United States Patent Application Publication US 2022/0273711 A1 - sequence listing, part 2

SEQ ID NO: 12475 - protein, 180 aa, Artificial Sequence; identical to SEQ ID NO: 12474
  Synthetic

SEQ ID NO: 12476 - protein, 180 aa, Artificial Sequence
  Synthetic
SELDDLLRRIRELVRRAEEDLKRVNEESARLVEEMDKDNKRVDEESAKIAEDLKREKKEDRDKVREVLKRLEDKYRELARRNKKILDELRKKYEDLIKKVRDIIREIDKRVKEVKDEDKDGTKKIEELKREVKKIADELERILKELEDSLREWSERVRKSLEELKDSLRRWAEELKRDLK

SEQ ID NO: 12477 - protein, 180 aa, Artificial Sequence; identical to SEQ ID NO: 12476
  Synthetic

SEQ ID NO: 12478 - protein, 180 aa, Artificial Sequence
  Synthetic
KDLERVVKEIERLVREAEKKIREVNDRSAKLARDLDRRNREVLKEIKKIAEDLEREKKEDEKAVRDLLREIRKKVEDVKETNERILRKLRKEYEELRREVKKILEEIEKLVRDVERKDKDGKERVERLKRELERLKRELEETLKRLDEELEKWEERVRESLKRLEDRVREILKRLEDDAR

SEQ ID NO: 12479 - protein, 180 aa, Artificial Sequence; identical to SEQ ID NO: 12478
  Synthetic

SEQ ID NO: 12480 - protein, 180 aa, Artificial Sequence
  Synthetic
DELETVMKRIRELAKELNKKNKDVLDEIEDLVRKADKRNKEVLKRIEEILREARKRKKDDKDRVREVLEEIKREVKKLERENEEILKRIEDTLRELERDNERILEEIRRLVEDAERKDKDGTERVKRLKDELRRLIEEVRRNLKRLKEEVDKIRERVRRSLKKLKEDVKRLSDEVKETLK

SEQ ID NO: 12481 - protein, 180 aa, Artificial Sequence; identical to SEQ ID NO: 12480
  Synthetic

SEQ ID NO: 12482 - protein, 182 aa, Artificial Sequence
  Synthetic
KEIEDLLRELRELVKEIDDLIKDATREIERLVKEVHDKNEKVTRRLEKLMRELREVARRGDLRDDDIRKAIREMEELSKEVEDTNRKVIEDLRRLSERLEEEVRKLIRRAEELVADIARKRGRDERIETLERALRELVRELEEKVDEHRKRTDKVARDLKKSVDDHRRRTEELVRELRKTEE

SEQ ID NO: 12483 - protein, 182 aa, Artificial Sequence; identical to SEQ ID NO: 12482
  Synthetic

SEQ ID NO: 12484 - protein, 182 aa, Artificial Sequence
  Synthetic
SELEDVLRRAKKLVEDVHRDNKRVTEELEKLARELHKKNEDVLRELKKLADDLREMLKRGDLREEDIKRVRTEIRKLLEDVRETNKRLIERIKDLSERVREINEEVIKEMEELLEDLRRRDGDDEKVKRLEEEIRRLARELRESVRRHKERTEELVERLKESLKKLEEDIRRLEKELEDDRR

SEQ ID NO: 12485 - protein, 182 aa, Artificial Sequence; identical to SEQ ID NO: 12484
  Synthetic

SEQ ID NO: 12486 - protein, 182 aa, Artificial Sequence
  Synthetic
SDLDDVLRRIRELAKRVHDENKRVTEELERLVEELEKKARELLRRIEELVRTLKEMRERGDARREEIEKVIEDIERLVRKIEDLIRKLIERARRLSEEVEDINRRVIEELRELVRELERRTGEDERVERLRRELEKLVKELEESVRRHKKRTRELEERLKDVLRELEDAVRRLVEELEKTDE

SEQ ID NO: 12487 - protein, 182 aa, Artificial Sequence; identical to SEQ ID NO: 12486
  Synthetic

SEQ ID NO: 12488 - protein, 182 aa, Artificial Sequence
  Synthetic
EEIERLLEEIKRLVETVHESNRRVLKELRDLAEELKRRNTKSNRDMERLVEELEEMRRRGDAREEVIRRVIEELKELLDRLHKDNRDAEREVERLVREVKRENDDVIRRIEELVEDLRRKRGEDEKVKTARDEVRRLVEELKESVERLARELKKLVDELRKVDEDNKRRLEELERRLRESTR

SEQ ID NO: 12489 - protein, 182 aa, Artificial Sequence; identical to SEQ ID NO: 12488
  Synthetic

SEQ ID NO: 12490 - protein, 182 aa, Artificial Sequence
  Synthetic
SELEDVLRKLEKLAREVDKINKDLIKRVEELARELKKKNEKSNKEARDLVKKLKEMKDRGDLRREDIDRVEKRLEKLLKELHEENKRVIDEIRKLLEEAEETNRRVIEEIKKLVKELEDRDGDDERVRRLKKEVEELERRLRRSVDDLRRKIKELEDRLREIDERNKREIEKLVKELRDTDR

SEQ ID NO: 12491 - protein, 182 aa, Artificial Sequence; identical to SEQ ID NO: 12490
  Synthetic

SEQ ID NO: 12492 - protein, 182 aa, Artificial Sequence
  Synthetic
DELETVAKLLEDLSRTNEDRLREVKETLKRLADTVDKINKEVLRRLRELAKRLKELKERGDLREEKIERVKEELERLVDKVRKENKEVDDEVRRLVDEVRKHSKRVIEELRKLVDDLRRRRGEDEDVRRLEEELRKLEERNRRLVRELEEVLKKLKDELKKSVDRLKEELDRLVKELDEIKK

SEQ ID NO: 12493 - protein, 182 aa, Artificial Sequence; identical to SEQ ID NO: 12492
  Synthetic

SEQ ID NO: 12494 - protein, 182 aa, Artificial Sequence
  Synthetic
SEIEDALRKMEKLAEDVNRKNEEVIREVRRLSEENKKKLDDVLETLKKLVRELAEMTKRGDIREEDIKRVIREAERLVKELDDHSKEVIKEIKERLRRVEEENKRVIDEIKKLVKEIVDKEGRDERIRTLEKAVRDLVRELEESVDRLRREADRLVEENERVVERLKRELKRLVEELERRAK

SEQ ID NO: 12495 - protein, 182 aa, Artificial Sequence; identical to SEQ ID NO: 12494
  Synthetic

SEQ ID NO: 12496 - protein, 182 aa, Artificial Sequence
  Synthetic
DELREVLERVKRLVDTVNKINDDLTKRNEDLSRKNVDKIRRLTEEIERLVEEVDRARREGRLREREIEKVIRRSKKLSEDLKKHSEDVIRESDELLKDAERVNREVIKEIEELVRDLERRRGRDEDVRRLEEEVRKLVEELRRSVEDHKRRNKESVDRNRRAVEEHERRNREVVERLERKAK

SEQ ID NO: 12497 - protein, 182 aa, Artificial Sequence; identical to SEQ ID NO: 12496
  Synthetic

SEQ ID NO: 12498 - protein, 182 aa, Artificial Sequence
  Synthetic
SDIEEALKTMEELSRRNEETLRRVLKRLKELADEVNRKNERVLEEAKELADRLRELRERGDLRKEDIDRVIREIERLVKEVADTNKKVIEEVKRLVERLEEHSREVIRRLEELLRDIRRKKGDDERIKTLEEDLRRLVEENKKVVEELKRRLKKLVDELRESLKELEKAVRKLVKELRDDEK

SEQ ID NO: 12499 - protein, 182 aa, Artificial Sequence; identical to SEQ ID NO: 12498
  Synthetic

SEQ ID NO: 12500 - protein, 177 aa, Artificial Sequence
  Synthetic
SSKETVAKRVEDVKRELEEVLKELARESKRLSDRDKKLNEEAAEEIERLKDELRKKVRDKDTLEEVLRRLEELLRRLNEHSRDVIRRSEDSLRKAADFVRRLKETADKLLEELKRVDDDEVLERIVKRVRDLVEEIKRRLEKLAEDNRRLSKRNEDVIRTLLEEARKLVEKVKEEVR

SEQ ID NO: 12501 - protein, 177 aa, Artificial Sequence; identical to SEQ ID NO: 12500
  Synthetic

SEQ ID NO: 12502 - protein, 177 aa, Artificial Sequence
  Synthetic
RSKEEVAKEIKRLKEENKRLLDELAKRSEELERRDRRLNEEHHREIRRLTDELRKKVRDEDTLREVEERVRKIDEDVNRHSEEVIRESRESLKRVADHSRKVVEDLERLLEEAKRVDDDRVLKEIVDEARRLSERNEEVLRRLLKENEDLSKRNEDFIRKTMKELRDLAEEVKERAK

SEQ ID NO: 12503 - protein, 177 aa, Artificial Sequence; identical to SEQ ID NO: 12502
  Synthetic

SEQ ID NO: 12504 - protein, 177 aa, Artificial Sequence
  Synthetic
KSKEDVKREIERLKKENREVLDTARKRIEDLIREDERVNREAAEEIKRLVEELERRVRDREELRKVTEELKKLLEDLNRHSEEVIRTLRKLLDDLRKHSEEVERRLEKLLEELKRVEDDRVLKEIVEELRRLSEENKRRIERALEELEKLSKDNTDRIEEAREDLRRLVRELLEKEQ

SEQ ID NO: 12505 - protein, 177 aa, Artificial Sequence; identical to SEQ ID NO: 12504
  Synthetic

SEQ ID NO: 12506 - protein, 177 aa, Artificial Sequence
  Synthetic
KDEEEVAKEIERLKEENDRVLKEAADKIEKLKKENREVNTRAAEEIERLKKELREKVRDKDLLRKLEEELRRLLEELKEHSERVERELEKLLEDLARHSEDVKRRLDEILEELKRVRDSRVLEEVVRRLRKLSEENKKRIKEMLDDVERLSRRNEEKIRRVLEDARRLLEDLTRKAK

SEQ ID NO: 12507 - protein, 177 aa, Artificial Sequence; identical to SEQ ID NO: 12506
  Synthetic

SEQ ID NO: 12508 - protein, 177 aa, Artificial Sequence
  Synthetic
SEKETVAEEIRRLIEKNKKMLEDHTRDIRRLEKENDDVNRKHHEDIRRLKDRLRKEVRSEETLRDLTKKVEEIDEEIKRHSEEIKRRLREINKELKEHSDRVVERLRKLLEDAKRVDDSRVLKEIVDEARELSKRNEDKIRKSLEELKRLSERNKKKIEDTLKELRKLAEEVKRRAT

SEQ ID NO: 12509 - protein, 177 aa, Artificial Sequence; identical to SEQ ID NO: 12508
  Synthetic

SEQ ID NO: 12510 - protein, 177 aa, Artificial Sequence
  Synthetic
SEKERVADDIRKLEEENKEVLDRAAEEIKRLKKRDRELNKRHHKTIRDLVDELEKKVRDEETLRRVKERMREIDERVKESSKRVEDELEKLLEELKRHSEEVVRRLRELLERLKRVDDSRVLDEIVKEARDLSEENRKLIEEALERLRRLSRENEETIKKTMEELKRLVEEVKERAR

SEQ ID NO: 12511 - protein, 177 aa, Artificial Sequence; identical to SEQ ID NO: 12510
  Synthetic

SEQ ID NO: 12512 - protein, 177 aa, Artificial Sequence
  Synthetic
KSKEEVADKIRKLKEENRKVLERHTREIEKLKRDDEEANKKHHEDVKEVMKRLEKEVRDKDTLEKVKREAKKIDEDLRKSSEEVMRTLDEINKDVARHSKEVAERLEELLERLKRVDDDRVLEEIVREAEELSKRNKDRIDESLKELRKLSEDNKREIERTLEEIKRLAEEVRRRDT

SEQ ID NO: 12513 - protein, 177 aa, Artificial Sequence; identical to SEQ ID NO: 12512
  Synthetic

SEQ ID NO: 12514 - protein, 177 aa, Artificial Sequence
  Synthetic
SSKERLKEMIDRLKERNKDLLRKAAEEIKRLEDEDREVNRRHHEEIERLKKELREKVRDKDTLKELEERVEKIDEDVKRNSKRVVETLRELLKRLADHSKRVLEELDRLLEELKRVDDDRALDEIIKEAKKLSDDNERLIRDVLRRARDLSRRNKETIRRTLEKLKREAEKVKEDAR

SEQ ID NO: 12515 - protein, 177 aa, Artificial Sequence; identical to SEQ ID NO: 12514
  Synthetic

SEQ ID NO: 12516 - protein, 185 aa, Artificial Sequence
  Synthetic
SDADRIIEEARRLSEENKRRIEEVLKRNRKLSKENHDKNDELLKRVRELLRRVVERLRREEGREEIKKLVEELEKELDKILEESRRSTEEVKDESRRLLEEIRRSTKEVKKTLDDLLRKVRERVRDKDKLKRLEDEVRKLTDENRRVTEKAERDLRRSNRENDRSTERLEEEIRRIKKRLRDEAR

SEQ ID NO: 12517 - protein, 185 aa, Artificial Sequence; identical to SEQ ID NO: 12516
  Synthetic

SEQ ID NO: 12518 - protein, 185 aa, Artificial Sequence
  Synthetic
REAEDLIRRLRELVRRHHELNRKLAEELRKLSEENKRKIEKVTREVEKLVKDVADTLKDDRGDERLERLVKELKDRLDELVKEIERSTREVERRMREVLKRSRDSAREVEERVERLLEEVRRRVRDKDKLKRLEEELERLKEEVRKSNRDLEKEVRDLRKENEKVTEEVKKRIEDLKRKLDEDRR

SEQ ID NO: 12519 - protein, 185 aa, Artificial Sequence; identical to SEQ ID NO: 12518
  Synthetic

SEQ ID NO: 12520 - protein, 185 aa, Artificial Sequence
  Synthetic
SEVDKIIKDARDLLKEHHEKNKRLIEENRRLSEENKDRIRRALEKLKKLVDDLRRLIEEVDDRDTLRELVRRVERTLDELLKDIERSTDEVRRESERLLEESRRSAEEVKRRLDELLKEVRRRVRDKKKLDELETEVRRIKETIDRSNERLERELEKSNRENKKVTDDAREVVKKLKEEIKRDED

SEQ ID NO: 12521 - protein, 185 aa, Artificial Sequence; identical to SEQ ID NO: 12520
  Synthetic

SEQ ID NO: 12522 - protein, 185 aa, Artificial Sequence
  Synthetic
SEADEIIKEAKKLADDHHRLNKEIIERNKRLSEENHKLNEKIIEDVRRLVKDVAERLKRDEDRRDLDRLVDEVREELRRLLEESERSTEDVKRESKRLLDESKKSAEDVKRDLDRLLKEVEEKVRDKEKLDRLREKVEEIKRRVDKSNDELRRSMEESNKRNDESTDRLREELRRLDEELDRRRK

SEQ ID NO: 12523 - protein, 185 aa, Artificial Sequence; identical to SEQ ID NO: 12522
  Synthetic

SEQ ID NO: 12524 - protein, 185 aa, Artificial Sequence
  Synthetic
SDLERVLKELRELVRRHHELNKDIIRRARRLSEENEKDIKKLLDDARKLLEEVKRTLDRMEGKEEVDKLIEELERRLDKLTKRLEDSSRDVKRRLRELLKRSEESAREVKKTIRKLEKELTERVRDKKKLDEARTELRKLEEEVDKSNKELRDEVEKLERRNDELLERAREEVERLKEELRRKAT

SEQ ID NO: 12525 - protein, 185 aa, Artificial Sequence; identical to SEQ ID NO: 12524
  Synthetic

SEQ ID NO: 12526 - protein, 185 aa, Artificial Sequence
  Synthetic
SKAERIIEEVRRLSEDNKRRIKKLLDEAKELLDRHHKRNKELLEEIERLLREVKERLKKDRGRDRIRRLVEEAKKRLDEVLEDSKRSARELKKTLDELLKRLEKSSEDVERRLRKLEDDVRREVRDKDRLEELRRDLERLRKENKDVLDRVREDIKRLKEELDDSNRRLKDTIEDLKRELDEEAR

SEQ ID NO: 12527 - protein, 185 aa, Artificial Sequence; identical to SEQ ID NO: 12526
  Synthetic

SEQ ID NO: 12528 - protein, 184 aa, Artificial Sequence
  Synthetic
SEVEELVKDLKRILDEIKRTNDELNKELKRLSDESRKLSKENIDRLRRILEEIEKTIRRRKTEEVKRRIEELVERMRRSSEEVVRRIEKLNEEANRKVEKVKRENKELLERAERKVREVAKRIKDEEKVRKLEKLLEDIKRTVDKIIRESEKRAEEINRDNRRIIEENKKKLEEIARRVEELAR

SEQ ID NO: 12529 - protein, 184 aa, Artificial Sequence; identical to SEQ ID NO: 12528
  Synthetic

SEQ ID NO: 12530 - protein, 182 aa, Artificial Sequence
  Synthetic
SSIEELAKRLEDLIRELRDRHRRLNEELKELTDRNRKEIEEANERIKRLIDDLERLRRRGDIDEKRIREIIKRIRELSKEIEKRSEKIIRELERLVEELAKETEDIIRRARELVEAIRKERGDNEEIDKLRRELERLEEELKKVLDRTREELERLVRDNRRLNKEHKDHSDTLVRRLEESRK

SEQ ID NO: 12531 - protein, 182 aa, Artificial Sequence; identical to SEQ ID NO: 12530
  Synthetic

SEQ ID NO: 12532 - protein, 186 aa, Artificial Sequence
  Synthetic
SEVEDLIRDLERLLKEHDELNKRSMEELEKLLKDLEKMVRDSLREAREIAERVKETIKRTSDKEDLRRRLKKVKDDLDESHKDLARLLKEIEERIDRILRENERHLEEIKREIKKILEELERAKKGEEKKLDEARKVLEEIKKRLEDSLRRLREEAERIKRELKRILDEHRKEIERIKKEIDEAAR

SEQ ID NO: 12533 - protein, 186 aa, Artificial Sequence; identical to SEQ ID NO: 12532
  Synthetic

SEQ ID NO: 12534 - protein, 186 aa, Artificial Sequence
  Synthetic
SEIEKVLRDVEKLVREHEDLNKKSAEEAERLTRDNKRRVDESKKRIREILKEVDEIIRRTERKEDLERKLTEVRRRIDKSHKELKEHSDEVVKRLKEILDRNAEHLEEIERRIDKILDDVRKRKQGDDKDLRRLAEEAERIKKRLRDSLDELRKIIEELEERNRRINEDHRRDLEDVKRRIEEKSK

SEQ ID NO: 12535 - protein, 186 aa, Artificial Sequence; identical to SEQ ID NO: 12534
  Synthetic

SEQ ID NO: 12536 - protein, 186 aa, Artificial Sequence
  Synthetic
SEIEEVARRAEKLTKENEELIRRSLRDIERLVKEMEDIVRKSLKEIKELVERLKDISRKTSRKEDLRRIIEDIKRKIEESHKRLAELLRDIVRKIRESHERVNKHSKEVMERLDRLLEEVEKAKKGEDEKLRRLAKRIEELKKRNEDLNREHRKRLEEAEKRLKDVLDEHRRRLEEVKKELDEEAK

SEQ ID NO: 12537 - protein, 186 aa, Artificial Sequence; identical to SEQ ID NO: 12536
  Synthetic

SEQ ID NO: 12538 - protein, 186 aa, Artificial Sequence
  Synthetic
DEIERVLEEIKKLTDDNRKLVKESIDRAEELLKRHEEENKKSVERARKLVRDLDEIRRKTDRKEDLRRIIKEVREELKKILKENADHAREIMRRLEESHKRLNEHSKRVVEEIRRLLEEVKKAKKGDKKKLDELARRAEDMERDNKRINKEHRERIKEIKERIKESLDRLAEEIKKIEKELEDKAR

SEQ ID NO: 12539 - protein, 186 aa, Artificial Sequence; identical to SEQ ID NO: 12538
  Synthetic

SEQ ID NO: 12540 - protein, 186 aa, Artificial Sequence
  Synthetic
SEIEKVLEDAKKLTKENEDLIRKSLEDNERLLRRHEEENKKSAEDMRDLLRRLEDIIRKTSRKEDLERIIREVIETIRRILKRNAEHAEEVIERSRRSHEEVNRHSKEVIDTLRKLLEEVREAKRGSEELLERLAREIKKLIDKNRKLNEDHRRESEKSERRLRESLRKLAEEAERIEREMDKSRK

SEQ ID NO: 12541 - protein, 186 aa, Artificial Sequence; identical to SEQ ID NO: 12540
  Synthetic

SEQ ID NO: 12542 - protein, 184 aa, Artificial Sequence
  Synthetic
SKIEKIVRDAERLLDELRKLAEDVLRRLEELNRRAEDVIRRLAEENTELLKRLEDLLETEKTADEKLKRAVEKLEKASEESVDRLRRLIEELKKEHKRLLEELERVVKKVDDDLKRLTKEIEGTDKKKAEELKRKAEEIKRRIDKIVDEVRKAIRDSAEHLKRLLEEYRRRVEEVKKRVRDAAK

SEQ ID NO: 12543 - protein, 184 aa, Artificial Sequence; identical to SEQ ID NO: 12542
  Synthetic

SEQ ID NO: 12544 - protein, 190 aa, Artificial Sequence
  Synthetic
DELERLREEVKRLSEENKELIKEMEKRNRELSKENEKVNRELKKRVDDIIRTLKELRKEGRDEETLTRMLDRVRKELKRLKEENKKILEDLRRRSEELARRLERADEELKKRLEDLARDLKRKLKDGDEKEEREIRRVLEDIKRIADENERENREALKRLEETNKRNTDHNRDVLREIDKLFREVAEELR

SEQ ID NO: 12545 - protein, 190 aa, Artificial Sequence; identical to SEQ ID NO: 12544
  Synthetic

SEQ ID NO: 12546 - protein, 180 aa, Artificial Sequence
  Synthetic
SEKEEVIKRIREELKENEKENRDVIRKIRELLDELRRRVEEVLRRLKKSNEDIEREAEKKPRTEELKKLLDEVKERSKELTERLREALKEAAKVVERVVEEIKRINDELRKRIERLEEKLDEVREEELKERIKKLSKENKDRVRRMLERIKKLVDDLRRLLEELRRRNEKLLDRLRKAIK

SEQ ID NO: 12547 - protein, 180 aa, Artificial Sequence; identical to SEQ ID NO: 12546
  Synthetic

SEQ ID NO: 12548 - protein, 180 aa, Artificial Sequence
  Synthetic
KDEEKVIEDIRRILEENHRENKEVIDKIRELLRRNEEENKEAIRRMRKSNKEITDRAEEKPQTEDLRRLIKEAKDESDKIIRRLEELNKRLRDAVRELEKKIKEINKELKRRIEELERRLDKIRREELERRVRELSKENKEMLKRVEDKIRELSERNKRTVKKVREDNERLIRRLEEEDK

SEQ ID NO: 12549 - protein, 180 aa, Artificial Sequence; identical to SEQ ID NO: 12548
  Synthetic

SEQ ID NO: 12550 - protein, 188 aa, Artificial Sequence
  Synthetic
SELERIEEDVERLNRRNEETLKRIDEALKRLEKSNKELDEKLEETVKRIKDRVERVKRRNVDEEDLRRLDEEIERTLRELKKELDEHLRRVEDTLRRLKTESRRLLKEIKDRLEEIEKEEADGNLPDKAKREVDKVRTDAREILKENKRRNEDVIRKIEEKVRDLERRNRDLLRRVKTKIDRLREELK

SEQ ID NO: 12551 - protein, 188 aa, Artificial Sequence; identical to SEQ ID NO: 12550
  Synthetic

SEQ ID NO: 12552 - protein, 186 aa, Artificial Sequence
  Synthetic
KELEDIARRVDELNKRNEELIKDAKRVLKEASDKNKEMNERVDDKLRRLAKKVKELTGTSEEMVERLKRELETVKEKIRKESREILEELKEVLKDLERRMRKLEEENKTVLREIEERLRKRNGGKEERDKIRDLLRRIREKIEKNRKDAEDVLREIKKLIDENKKRNEEVLKKIEELLRELEKRLE

SEQ ID NO: 12553 - protein, 186 aa, Artificial Sequence; identical to SEQ ID NO: 12552
  Synthetic

SEQ ID NO: 12554 - protein, 182 aa, Artificial Sequence
  Synthetic
SRLEKVIKEIKKTHEELERRFKKNSDEAEESLKRLEDELRKVVTDIERKLRDLERRVREAGRRREELEKLAEDLKETIERLRKEVKELMDRHRDVNREIEERLRRLARENEERLRKADEKPRSEELITRLKKHVDDTAREVEELIKRHTEHNEKLRRDIKKLLEELKRKVDELRKEIETRTR

SEQ ID NO: 12555 - protein, 182 aa, Artificial Sequence; identical to SEQ ID NO: 12554
  Synthetic

SEQ ID NO: 12556 - protein, 181 aa, Artificial Sequence
  Synthetic
SELEELIKRAEDTIRRLEREIDELIERHRRSAERLRETLKELIDRHRKSIEDVMRELKRRRGRVPDEVKRTLEKSKRDLDRLAEELEKTLKESEEELKRLKDRLKETLDKLREDLKELAKRGRTGKEEIERLIKELEKKIKEVVKRIRDIDEDLKRKAKKVVDDLRELNERLERKAKEATK

SEQ ID NO: 12557 - protein, 181 aa, Artificial Sequence; identical to SEQ ID NO: 12556
  Synthetic

SEQ ID NO: 12558 - protein, 185 aa, Artificial Sequence
  Synthetic
SEEERLRDHSRRVEELARRAAEKLRRHSEDVKRLITELIKLIEDVMKKIEDEVRDAEKRGDTDETLVKRIEELVTRLEKTLRDMTREIRRSHKELEDTVRRLVEELKRSNKELKKEIDEGDLRDELKKRIDELHKRNKDKLDEISERLKRLLEENRKLIKEVEERLRKLLEDLRKLIEDVKRRLR

SEQ ID NO: 12559 - protein, 185 aa, Artificial Sequence; identical to SEQ ID NO: 12558
  Synthetic

SEQ ID NO: 12560 - protein, 185 aa, Artificial Sequence
  Synthetic
DFEEEIRRNLKRVRDLAKKLEDLIRKHSEEVKRLAEEVKREIEEVIKRAKKKMEDVRRDGDNDETLLRELERTLRELERKLRELSERLRRSNEKLKRDLKRVRDDLKRSHDDLERRIREGDLRDELKKRADRLLDEHREELKRIEDRLRELLERNNRLLEDIDRRLKELLEDLRRVLKEIEEELR

SEQ ID NO: 12561 - protein, 185 aa, Artificial Sequence; identical to SEQ ID NO: 12560
  Synthetic

SEQ ID NO: 12562 - protein, 186 aa, Artificial Sequence
  Synthetic
SEVERLLEDLRRLAKESDESLKKSHRELRKRHEEVRRTIEELLKDLERTVKEIKEELERDVKDEKKLKELEDRLRELIERLRELMKRLTDESRRNLEEDKRLLEEYREALKKLEEELKELRRAGLPEEDVRREIKRVLDTIRKLNEDWKRRNEESKRRLDKLLDDAKKAIDKIVEDVKKLLEDARR

SEQ ID NO: 12563 - protein, 186 aa, Artificial Sequence; identical to SEQ ID NO: 12562
  Synthetic

SEQ ID NO: 12564 - protein, 186 aa, Artificial Sequence
  Synthetic
SEVEKLLRDLERLARRVREELRKSHEKLDKLARDSKKSIEDLLEDLRRIIEEIEEELDRRVRDKDKLKRARDELRRLIDELRKIVEKYEEELKRLKKEDRDTLKDVDDKLRDLRRRLKKLREDGLPREDVEREVRRIKREIKELLDRWRRANEEIAREIRKLNEEVKRRVEKILRDLEELLRRLRK

SEQ ID NO: 12565 - protein, 186 aa, Artificial Sequence; identical to SEQ ID NO: 12564
  Synthetic

SEQ ID NO: 12566 - protein, 184 aa, Artificial Sequence
  Synthetic
SELEKLEKELKDLLDKIRRDLEKSLKENDELVKKIEEDLKDLLKKLDDRLEKVARDLKREKSGREKELEDLRRELEKIKEELKDELRRLKDENRKSKEDNERILKKLEDELREIERRLREAKIERETATKRVKEVLDKLRKMLEDLRRHNEENKRRNKEVLDELRKKAEDVLRRIDEALKELKR

SEQ ID NO: 12567 - protein, 184 aa, Artificial Sequence; identical to SEQ ID NO: 12566
  Synthetic

SEQ ID NO: 12568 - protein, 183 aa, Artificial Sequence
  Synthetic
SVEEMETRLKEVADDLKKKIDEVLTRLEKLNRELTKRSRDMNRELERLNKEAEDRARDVLKRVDKDTLKRELEELKKHVKEVKDRSREIEEKLRRHLDEVRKRVEELKRRLDDTLRRLRERQVDRDEARKLLRDLERLIEEIKKTLDELLKHHKEELDRIDREHEELLRHHKKTLERIEEKID

SEQ ID NO: 12569 - protein, 183 aa, Artificial Sequence; identical to SEQ ID NO: 12568
  Synthetic

SEQ ID NO: 12570 - protein, 176 aa, Artificial Sequence
  Synthetic
DRVEKVLREIEKRLRDHRKRLKDALDEIRKRIEEHEEKSERLNRESKKLLKDLEDMKRRGDLDEDTVRRLEEENKKLLDELDKHLKRLKEEIEKLLRDLNRHLEKLKEDIKRLEDEVNIDEEVVRRARELVKRLEEDHRRMVEEIRRTIKRAEERHKKSVEDNEKLLRDLRDRLEK

SEQ ID NO: 12571 - protein, 176 aa, Artificial Sequence; identical to SEQ ID NO: 12570
  Synthetic

SEQ ID NO: 12572 - protein, 176 aa, Artificial Sequence
  Synthetic
SEVEKVLEDLKRLLDEHEKRSRELNKRSKKLADEARRINEELLRELKKLLDELKELKDRGDLDERTVEELRKTAEDINRRNKEMLKKLSDENEKLLDELNKHLEELERRVRELERDANVDKKFLDDMRRLLEELKERHERSERENRKLLRKLEEDSKRTNDESKKLLDKLRDDLEK

SEQ ID NO: 12573 - protein, 176 aa, Artificial Sequence; identical to SEQ ID NO: 12572
  Synthetic

SEQ ID NO: 12574 - protein, 176 aa, Artificial Sequence
  Synthetic
DRVEEVLKRVEELVKRHDERLKELEDDLRRLIEEHLEKSRRLNKESEKLLKEILEVKRRGEADEKVAEDVERRNEKLLRELNEHLERLERTAKKILEEIDDHLRRLEEEIERLKRELNLSEEVVKTIDEIVKELRKRHEEVRKRLKELLDEMRERHERSVRRNRERLEKLLDDLRK

SEQ ID NO: 12575 - protein, 176 aa, Artificial Sequence; identical to SEQ ID NO: 12574
  Synthetic

SEQ ID NO: 12576 - protein, 176 aa, Artificial Sequence
  Synthetic
SEVERVLRDVERLLEEHRKKSKEANDTSRELARRHKEESDRLNKKSEDDARRLEDVKRRGEVDEEKLKELSKRNKKLLDDLNRHLEKLKEDNERLLRELDEHLRRLEETIKKLERDVNIDEDMVRRIREIVKKLKRDHEKSVEDNRRLLRELEERHRESVERNEDLLRRLEERARK

SEQ ID NO: 12577 - protein, 176 aa, Artificial Sequence; identical to SEQ ID NO: 12576
  Synthetic

SEQ ID NO: 12578 - protein, 176 aa, Artificial Sequence
  Synthetic
DEVETVLRDLKRLLDEHRRRSEELNKRSEELLREHEERSKRLNERSEKLARELREMKKRGEVDEETVKDLARENEELLRRLDKHLEDLERENKRLLRDLDRHLEELKKTVEDLKRRANVSEEFVKRMDELLRKLEEDHRRSVRENEKLLEELRRRHKKSVDDNRRLLEKLKRDADR

SEQ ID NO: 12579 - protein, 176 aa, Artificial Sequence; identical to SEQ ID NO: 12578
  Synthetic

SEQ ID NO: 12580 - protein, 176 aa, Artificial Sequence
  Synthetic
DEVEEVLRRIEELLTRHRKKSDDLNRRSEELAERHERTNRTLLEELRDLAKKLEDLKREGKLDERTVEELKKRAEKINRENKKHNDELRERNKRLLRELDKHMRELEERIRKLEKDVKVDEEVVKRMRDLVRRAKEEHKKSVDDNRRTLKELHDRSKKTNDDSRELLKRLEDRLRK

SEQ ID NO: 12581 - protein, 176 aa, Artificial Sequence; identical to SEQ ID NO: 12580
  Synthetic

SEQ ID NO: 12582 - protein, 176 aa, Artificial Sequence
  Synthetic
REAEEVLERIRRRLEEHLEDNERILREIKKRLDEHREKSKRVNDRSRELVERLLAVKREGKVDEEKVERLKKENEDLLRELDKHLEELKRRIRKLHEDNRRHNKELEDEIRRLEREANLSEDIVREIRRIVRELHERSKDSNREVERLVRKLEDDHRESVERNRELLKKLEDDLRR

SEQ ID NO: 12583 - protein, 176 aa, Artificial Sequence; identical to SEQ ID NO: 12582
  Synthetic

SEQ ID NO: 12584 - protein, 180 aa, Artificial Sequence
  Synthetic
RLEDVLREVREDLRRLNEESRKVLEENDKLDKDLNRRLKRLEEEARTEIKKVKDRLRDDEELKRLEKELEKILDRLRREVRKLNERNREELERLDKADKDINRELKRIEDEVKKLKERVDEDELEKRLTEVRKELEDRYRELIERSKDIIRRLEEEVRKLEKELRKVLEDLDRRAREATR

SEQ ID NO: 12585 - protein, 180 aa, Artificial Sequence; identical to SEQ ID NO: 12584
  Synthetic

SEQ ID NO: 12586 - protein, 177 aa, Artificial Sequence
  Synthetic
SEREDIKRLIEEIRKLVDEAAKEIERNIEEIRRLVKELEELSKKHIDEAREILERLKRRDDKKTIDEATERLRRSHKRLEERIREVKKRIDESHEKLREDLETLIREIRKLLRELRERTGDTELVEEMERDVREVERALRRLLDKHRRVLEDVERRLRRALEENRRVLEEIEEDSRR

SEQ ID NO: 12587 - protein, 177 aa, Artificial Sequence; identical to SEQ ID NO: 12586
  Synthetic

SEQ ID NO: 12588 - protein, 181 aa, Artificial Sequence
  Synthetic
KDEEATKKLRKAHEDSERHIKKLSEDTKKVHEESDRHIRKVSKETEDEARRIEKELRKLPDREELRDVMRRLKELLKTLREENERVRKRSEDLLRELEKRNKEVADESRKLLRDVEEALERGEVDEDTLEKIIEENKRLNDELAKENKEVIKENRKLNRELEERNKEVIDRMERILEETKR

SEQ ID NO: 12589 - protein, 181 aa, Artificial Sequence; identical to SEQ ID NO: 12588
  Synthetic

SEQ ID NO: 12590 - protein, 181 aa, Artificial Sequence
  Synthetic
REEELKREMEKAHEESERHLEELSRKTRDVHRRSEEHLKRLHERTKEVVDRIVEELRRLPKTDELRKVIEELERLLRTLKKENEDVRRESEELLKRLEEENKRVLKESRDLVRKVEEALRRGEVDEETLRRVIEKNRKLNEDIAKRNEEVIETNKKLNEEIARRNEEAIKTARKIVEDTKR

SEQ ID NO: 12591 - protein, 181 aa, Artificial Sequence; identical to SEQ ID NO: 12590
  Synthetic

SEQ ID NO: 12592 - protein, 181 aa, Artificial Sequence
  Synthetic
REKEVVDRLREEVRRVEEEVDRLNKELEEIARKVERELDKINEDYKRRLDKVREDIKRLPKTDELRTVEKRSDDHARELHKRSEEIKRDIRRRLKELHDRSREIKKTIRDLLRELEEMMRRGDVDEETVKRILETARELLDRWKKEVDEIVKTLEELLDRWRKEVERVKRENDKLLEELEK

SEQ ID NO: 12593 - protein, 181 aa, Artificial Sequence; identical to SEQ ID NO: 12592
  Synthetic

SEQ ID NO: 12594 - protein, 181 aa, Artificial Sequence
  Synthetic
DEKKVLDDLRRIVEKVKRDLDELLKDNRRVLREVEEELKRLNEELRRIAEEVTRELRRLPRTRELERIEKEIERRLKELHERSDELRRRLRKLHDELREKLERLKKRMEDLLRTLKDLVDKGDVDEKLAEEVARELRRLLREAEETSRDTKRKLREVLREWRELVKKIVDEMRRLLEEIKR

SEQ ID NO: 12595 - protein, 181 aa, Artificial Sequence; identical to SEQ ID NO: 12594
  Synthetic

SEQ ID NO: 12596 - protein, 179 aa, Artificial Sequence
  Synthetic
DLERLVEEIKRRLRELLKELHKKSKEIEEEIRRILKRHHELLERIVRRLEELVEEVKRRNSDDDTVKKRVKEEIDRLLEDYKRHLEEVERLLRKLLREYEEKVKEIEKEIRKLKKRLEEAGVDKKLLEDLEREIEKVKKAARDDLRRLEEIVRDVERRLRENVKRLKEEADRVKEELEK

SEQ ID NO: 12597 - protein, 179 aa, Artificial Sequence; identical to SEQ ID NO: 12596
  Synthetic

SEQ ID NO: 12598 - protein, 186 aa, Artificial Sequence
  Synthetic
EELERIKDEIRRILEELKREMEELTKESDRILRELERENEESAKRIKEILDELEKRVRDKPVDEKLKRELEELKERLKKLLKEVEDTTRKLKRELKELNRELRRRLEELEKRLRELLKKVDRDKSDDETLLRRLRESLEKLAKEVEDLLRKYERDVRELAKEDRKLNEELLKRVDDLAKEVRERLR

SEQ ID NO: 12599 - protein, 186 aa, Artificial Sequence; identical to SEQ ID NO: 12598
  Synthetic

SEQ ID NO: 12600 - protein, 182 aa, Artificial Sequence
  Synthetic
SKLEEIERELRELERSNEEEDRKWDDTTRKLEEDNREKNREWKKLTKDIRERVERLIRDLKDDKKTVRELRKEIRERSEKVRKELERHLEEVKDASRKLKKRLDDHRRELRDTVRRIRERLDKSEEARRLDEELEKVLRELKKRNEDTERRDREVNKKLEKENRDSEKENRDVLREIERALR

SEQ ID NO: 12601 - protein, 182 aa, Artificial Sequence; identical to SEQ ID NO: 12600
  Synthetic

SEQ ID NO: 12602 - protein, 179 aa, Artificial Sequence
  Synthetic
KKLEDLEEEIKKLLEELKERNERSAREDREILERLRDENRRTAEELDKSVREILKKTGDTEDLKKLKEEHKELKKRLKETTDRIRKTSKDLEKELRDATERIARELKRLVDDLRRKNLEDDRKLKEVRDTLEKLREENRKLNEEWRRKSEELRRRNEKVNKEVRDRNRETIERVDRKAK

SEQ ID NO: 12603 - protein, 179 aa, Artificial Sequence; identical to SEQ ID NO: 12602
  Synthetic

SEQ ID NO: 12604 - protein, 186 aa, Artificial Sequence
  Synthetic
EELERADRRLDRLLEESERDLDTIIRKLKKVVEELERTLEEAKRKAERTLEEIRRELKEAGLEERRLRELEEKLRRAEEELRKLEEDHRRRLKEVTDEVRRLIERHRRRLEEIKRRLEDLRRKGEPVEDLLREIKELLDDLRRHNEKLHRELEELIKTLRRHNEKLLEDIERLLRELRKEVEKLRR

SEQ ID NO: 12605 - protein, 186 aa, Artificial Sequence; identical to SEQ ID NO: 12604
  Synthetic

SEQ ID NO: 12606 - protein, 186 aa, Artificial Sequence
  Synthetic
DELRELRRELRKLLEDIRRRLEELTRENRDVLRKSREELERLLRRLKELLDRIRDSLRKRNGDEDKKRELEKVEREIEKLLRDLKRDLERLEKESEDSLRELEKELKRIEDEIKKLLEDAERLLERGEVDKDKMKKLLRDLERKLKRAEEESKRHIRENEKLTEEAARKVEELLKEIKRKLEELEK

SEQ ID NO: 12607 - protein, 186 aa, Artificial Sequence; identical to SEQ ID NO: 12606
  Synthetic

SEQ ID NO: 12608 - protein, 172 aa, Artificial Sequence
  Synthetic
SVEDTIRELEKRIRDLNREMERLNRESVEKIKRLNEKVRREIEDILREIKRLAENLKDVDERDLERLLKELRDELERLSRDSERELKRLEEEHRRARKKSEEDLRRLDKEVKDKPIDESLRRKLKKLADEHRETVDRMHEKNRKLADDHRDSVRKLEERIKRLTDRLREERK

SEQ ID NO: 12609 - protein, 172 aa, Artificial Sequence; identical to SEQ ID NO: 12608
  Synthetic

SEQ ID NO: 12610 - protein, 172 aa, Artificial Sequence
  Synthetic
SEVEETLKRLEEVIREAEKTIDDSNREIEEAVRRIKTTIEKSNRDLKDLVEKLKRLKEIDSEEVKRRLDEAAKRHKEILDDLRRKLEELEKRHRDTLKRLRERLDRIREEIERRGTTEDVRRRVKEIIDKLERKIEESERNLKRIIEDLEREMRESEERVKEIIRDLERTEK

SEQ ID NO: 12611 - protein, 172 aa, Artificial Sequence; identical to SEQ ID NO: 12610
  Synthetic

SEQ ID NO: 12612 - protein, 179 aa, Artificial Sequence
  Synthetic
SEIDEVLKRVEDSVREIERKLEEIERRLRRLNEEVKKRLDEIEEEIRRLVEELRRRNTKDERALRRIEEKIRDLKRKLDEILKKLKEDYERLKRELDKLLREHEERSERIKEELKKRGLPDDRLREIEKRIDDLNKKVRDEVERLKREADKSLETIKRLVEELKEKLDRLLEEVREEVR

SEQ ID NO: 12613 - protein, 179 aa, Artificial Sequence; identical to SEQ ID NO: 12612
  Synthetic

SEQ ID NO: 12614 - protein, 175 aa, Artificial Sequence
  Synthetic
STRERLKKVLRDVERANKELSDRNKRVLEKLRRDVERLSRENEKLVRELEEAIKDLRRKGRDLREEVERLSDEDRRANEELKRRLKKLEDDLDRIDRDLERKSRRLVEELEDLLRRLNVDEDLRREVEEVLKRIRDSNRDNRRKNEKVKKDIREILRRNEKRNREVNEKIRRDET

SEQ ID NO: 12615 - protein, 175 aa, Artificial Sequence; identical to SEQ ID NO: 12614
  Synthetic

SEQ ID NO: 12616 - protein, 185 aa, Artificial Sequence
  Synthetic
KETEEVKDVLRRVRKRIEDLSKKNKDDLRRVEERNKELNERVKRLLEELKRRVDDLKRKGRREDDLTREVEKLERELEEVLRRMREETRKLEDEIRRLNEELDRRLKKLEKEIRDTLKALRERVERREDLERVEEDVRRVIKEIRDLARENHEENRDVIRRIRESNKRTEDEAREVLDRIRKTAT

SEQ ID NO: 12617 - protein, 185 aa, Artificial Sequence; identical to SEQ ID NO: 12616
  Synthetic

SEQ ID NO: 12618 - protein, 177 aa, Artificial Sequence
  Synthetic
KEREEAEEMLKRLEEELRRLLEESEKIIERSERHLEKLLKDAEDEIRRVKEELDKIDIEEKVIEEVKRKIDEIKRRLEELAERARKVHKDLRDRHRKLFEEFKRVLDEIRRRLDSGGDREEIRRLIERLRELLEEIARRIEKTNRELEELNKRLADDIKRLIDELERVLREVEERSR

SEQ ID NO: 12619 - protein, 177 aa, Artificial Sequence; identical to SEQ ID NO: 12618
  Synthetic

SEQ ID NO: 12620 - protein, 175 aa, Artificial Sequence
  Synthetic
DEVETLLEEARKVLEELRKKIKELNEDSKRVLEELEKRIRDLDRRSTEVLRRLEESDLDRKEVKKMLDDLRREYEDMERRIKEVLDELEKKYRELEKEIDRAREELTKRLEDLKREGKSTEELEDALRKIRKAVEELKKDVRRTLEEIKKEVKRLIEEARRSLDKIRRDVEKRDE

SEQ ID NO: 12621 - protein, 175 aa, Artificial Sequence; identical to SEQ ID NO: 12620
  Synthetic

SEQ ID NO: 12622 - protein, 175 aa, Artificial Sequence
  Synthetic
EEVKRLVDDLREVTKENEKRARDLDRDSKRVSEENARKIETLNRDNERVNKELADSDRREEEVEDALRRLEEEYRRVHKENREETKRLREKYEELHERNKEVLERLKRKVDELRRKGKSTEKLDEDLERLERRNRKINEDAKTTLREIERENEELNKRLEETLRRSEKHLRDRRK

SEQ ID NO: 12623 - protein, 175 aa, Artificial Sequence; identical to SEQ ID NO: 12622
  Synthetic

SEQ ID NO: 12624 - protein, 179 aa, Artificial Sequence
  Synthetic
REVEKLIKELEDLNRDHARKVKELIAELEKLLRDHAEKVRKLIEEARKTLEDLREIVERKGPVEELLKEAEKKLKEIKEEIERSSKELKKEIDRIEEDIRRSTERLRREHKRVADDLRKKGLDKKDVREMIRRSEENLKRLNEEVKRAIRKVEEDLKELNKRARDVLEELRKRVEDTFR

SEQ ID NO: 12625 - protein, 179 aa, Artificial Sequence; identical to SEQ ID NO: 12624
  Synthetic

SEQ ID NO: 12626 - protein, 177 aa, Artificial Sequence
  Synthetic
SEEEELEKRLRDSEREIEKWLRDLERVIEEVAREDKKIHEELEKILEDVKRELDKLGIDDELRKELEKKLRKIKEELEKLNEDTRRELERVRRDLERLAEELKRRHDEIRKELERTGDSKVVEKLVEDLRRINEEAKRRLERLKEELRKVLKDYKDEIDKLVEELKRTLDEVRKKAK

SEQ ID NO: 12627 - protein, 177 aa, Artificial Sequence; identical to SEQ ID NO: 12626
  Synthetic

SEQ ID NO: 12628 - protein, 177 aa, Artificial Sequence
  Synthetic
DEEEDVRRTLEKVERDVERIDEDVERELRKVEEDDKRLHKELSEVVEKVERDIRRTGIEEELMDTARRRLEEARRELERLNKRTKELLDRIRKALEESHREVKELLERIEEELERTGDKKKLEELKERLKEALKRHEDKVRELKKELKKILDDYTEDVKRIKERLKRILEEIRRRKK

SEQ ID NO: 12629 - protein, 177 aa, Artificial Sequence; identical to SEQ ID NO: 12628
  Synthetic

SEQ ID NO: 12630 - protein, 177 aa, Artificial Sequence
  Synthetic
SSEEDVKRELERVRREDERIHRDLERVLEESERRVETWDRDAKRTLEKVEEDLRRDGLEKELVDKLKEALDRIREDIERSHRELRKLHEEIRDELRKLNEETDRRLRDIEDKLRKTGEEELLEELKRRLKEILDRYRREAERLKRENEEMNKRHRERLEELKKRLKELLERMKEARK

SEQ ID NO: 12631 - protein, 177 aa, Artificial Sequence; identical to SEQ ID NO: 12630
  Synthetic

SEQ ID NO: 12632 - protein, 177 aa, Artificial Sequence
  Synthetic
STEEDVRRVMKKVEDDVREINRDLERDLRRVEEAVERLDRDAKREIDRLREEIDREGIEERLKKEADEVLRRVEEEIKKSHEEVRRLLEEVERRLRESTKELEDRLRKVKEELDRTGDEKFAEDLKRKLKKVLDEHRRRIEELKRELEEVLERHARELKRLKDELKKLVDDIRRRRK

SEQ ID NO: 12633 - protein, 177 aa, Artificial Sequence; identical to SEQ ID NO: 12632
  Synthetic

SEQ ID NO: 12634 - protein, 177 aa, Artificial Sequence
  Synthetic
SDEEDVERELKRVKDEVDKINEDVRRELRKSEEDVERWDEDLERVVRRVEEEVRKTGIDEELKRKADERLEEAKKRVEDSHRRLREEHRRIEKDLRDSTREIEKLLRDIRKRLTDTGDKKVLEKLKKDLRDALKRHRDRVEKLKEENRKLNEDHKKTLEDIKEELKRLLDELKETRR

SEQ ID NO: 12635 - protein, 177 aa, Artificial Sequence; identical to SEQ ID NO: 12634
  Synthetic

SEQ ID NO: 12636 - protein, 177 aa, Artificial Sequence
  Synthetic
SDEEDVERELERVKRDVERLDEDAKRVLDEVRKAVEEINRDVERDLRRVEEEIKKTGIEERLMEEAKRRLERIKEELKKSTEELERLLEEVKRRIEESHRRMEEELRRIREELERTGSKEKLKELKERLKRLLDEHRRELKRLKDELKKALDDHKRKVDKLKKELKDILKKIRDDRR

SEQ ID NO: 12637 - protein, 177 aa, Artificial Sequence; identical to SEQ ID NO: 12636
  Synthetic

SEQ ID NO: 12638 - protein, 177 aa, Artificial Sequence
  Synthetic
DDEDDVRRVLRRVAEEVRKLDEDLKRVLKESKERVKRWNDDAKRRLDKVREDLKRKGLDESALRRAEDVLRRIKKRIDESTEDLDRLHKEIEKEVRDSHKKMREDLDKVREDLERTGDKKVLEELKKRLEDLLKRHEEEVRRLKEENKKLNDDHRRELERLKKELTDLLKRLDDERK

SEQ ID NO: 12639 - protein, 177 aa, Artificial Sequence; identical to SEQ ID NO: 12638
  Synthetic

SEQ ID NO: 12640 - protein, 177 aa, Artificial Sequence
  Synthetic
SLEEDVKRVIDRVREAVKKINDEVEKELRKSEKAVEDWNRRLEEIHDRARRELEKAGIDEELRKREKREHERSEEELRRSTEELKKKHDEIRKRLEDSTREAKKTLEEVERELRETGDKDKLEELKRRLKRLLDEHRKRVEELKEENKRLNKEHEKKVEDNVRRVRELLKRVEDRRR

SEQ ID NO: 12641 - protein, 177 aa, Artificial Sequence; identical to SEQ ID NO: 12640
  Synthetic

SEQ ID NO: 12642 - protein, 179 aa, Artificial Sequence
  Synthetic
SEVEEIVKKLEELLRRWEKTVRDIVEELKRLLEEIEKLSRETKERLKKILEDVKRLAEEGRLDDAEVDRLRKELEDLHRELEERLRELMREMEERLKEANERSKRIKEEIEKDLKELTDRRGRVDELEDIARRVKEELDRLNEELERIARKVKEDLKRLLEDNKRVLDEVKERLDRIRK

SEQ ID NO: 12643 - protein, 179 aa, Artificial Sequence; identical to SEQ ID NO: 12642
  Synthetic

SEQ ID NO: 12644 - protein, 179 aa, Artificial Sequence
  Synthetic
SEIEDIVRRLEELLERWKRRVDKAKERNKRLLEKWAKEVEDIKRELEKLLEDVRRLKEEGRSDKRDVDRLIERIEELLERLHRRSEEIKRDSRRHAKELHRISEEIKERIRRLLKKVTDDKGRVDELEKIVEDVERELDKINEDYNRVLKRVEEELDRLNEDLNRVAKRVKDALRKIEE

SEQ ID NO: 12645 - protein, 179 aa, Artificial Sequence; identical to SEQ ID NO: 12644
  Synthetic

SEQ ID NO: 12646 - protein, 179 aa, Artificial Sequence
  Synthetic
SEIEKVVEEAKKLLKRWEDEVRKHDKELKEVLDRWKKEVDDIKRRLEELLREVRRLKEEGRSDDRKLEELKREIDKLLEDLHRRSKRLVEDLKRTHDEVDDRSKKIKKEIRDRLKDIERRRGPVDELRKIVEDVERELDRLNDENRDSLRRVVEALEEINKDLNRDVKRVKDELDKTRK

SEQ ID NO: 12647 - protein, 179 aa, Artificial Sequence; identical to SEQ ID NO: 12646
  Synthetic

SEQ ID NO: 12648 - protein, 179 aa, Artificial Sequence
  Synthetic
SEVEEIKKELKKLDEENKRVIDRIVREIERLNEENERVARKVIKEIEELLRKLEKLRRDGRSDETVVRKIKKDLEELLKRLEEHIRESKDRLRDLLRRVREHLERSRRRMEELRDRVRRNGKEEEDLRRVLKESEDRNRKLLEDLERKVRDVKRRDDELLKRAREALKRVKDEIEKIRK

SEQ ID NO: 12649 - protein, 179 aa, Artificial Sequence; identical to SEQ ID NO: 12648
  Synthetic

SEQ ID NO: 12650 - protein, 179 aa, Artificial Sequence
  Synthetic
SEVEDIIRRIKELDDRNERKVRELVKTNEKLLRDLHEKSKRIVKEMRELLKEIEDLARRGKSDDRRLEEVRERLKRLLDDYERTVERLKETNERLNRELEKHLEDSKKRLEDLREEVRRRGKDEEELKRVIDESKKRNEKLMRDYEEISKKVHEDVERDAERLRRIAKEVEEELERVRK

SEQ ID NO: 12651 - protein, 179 aa, Artificial Sequence; identical to SEQ ID NO: 12650
  Synthetic

SEQ ID NO: 12652 - protein, 179 aa, Artificial Sequence
  Synthetic
SEVEKIKEDLKRLLDEVRKKAEELKRENRELLRRLHELSKKIIRELEKLLEELADLVRKGRSDDKVVKRIRDELEKLKREYERAVKELRDRNRELNEELKRVLERVKEDMDRLREEVRRRGKEDEDLERTIREVEKELRRLLEDYRRESKKVHEDIDEDRRRLEDAVREVEKEIEKVRR

SEQ ID NO: 12653 - protein, 179 aa, Artificial Sequence; identical to SEQ ID NO: 12652
  Synthetic

SEQ ID NO: 12654 - protein, 182 aa, Artificial Sequence
  Synthetic
SEVERIKEDIKKSNEDIRRTAEEIKERIKKSNKEVEDEVREIKERIKRILDKLKRVKEEGRLDDRLKKEAEKVLEDIKRKLEELEEKHRRDLKRIRDRLREVEKRHRDELRRLREELKRRGSDKSVVDDLERVMKESEERVKRIIDDLERTLRESEKNLKRIIDDLERVMREAREAIDRLKK

SEQ ID NO: 12655 - protein, 182 aa, Artificial Sequence; identical to SEQ ID NO: 12654
  Synthetic

SEQ ID NO: 12656 - protein, 178 aa, Artificial Sequence
  Synthetic
SEDDELRRRLEELKRRIEDLIRKLREVLKRSEDELRKILRELREVDKDLRRRIEELIKDIQDEEVIDRLKKLLKRHTDRSRELEKRLKEILDELRKRHEKVERDLRRILEELKKLSDDRELDEDEAKKRLEEILRRAEELLERLKRTNERVNRKVREDMKRAKEHAKRLLEEAEELAR

SEQ ID NO: 12657 - protein, 178 aa, Artificial Sequence; identical to SEQ ID NO: 12656
  Synthetic

SEQ ID NO: 12658 - protein, 180 aa, Artificial Sequence
  Synthetic
DEVEELIKEVEKVNEDAARESEKRNRELKKMLERVKRENKRLIRELKELLDDARRKNSKDSTLSETLKRVLKESKERVDRLVKRVDDLLRELERRDRELHKKLEERHRRIRDRLREEVREKREVLKKLEEVLRESKKRLKEWNDRNKKTLDDIRREIEKSKKEHEDALRRIEEELKKTET

SEQ ID NO: 12659 - protein, 180 aa, Artificial Sequence; identical to SEQ ID NO: 12658
  Synthetic

SEQ ID NO: 12660 - protein, 180 aa, Artificial Sequence
  Synthetic
SELEKLVKELRDLNEKVARDSKRLNDKLEEVLDRLRRRNEELIKRLEEVLEDVERKNSKDSTLEEELDRLLKKSREDLDRLVDEARKLLDEARKRDKKLHEDLKREHDRVAETVRRDISKDKELLDRLRKMLKESRDSLRKLNKENEETLRRIKKKLDESKRKHEEVLKDIKRRLEELSR

SEQ ID NO: 12661 - protein, 180 aa, Artificial Sequence; identical to SEQ ID NO: 12660
  Synthetic

SEQ ID NO: 12662 - protein, 180 aa, Artificial Sequence
  Synthetic
DEVERIIERLRRVNKRVREENERLIKEIEDLITEIAKRSRDLNRELDKTLKDVRRKNDKDERLKREVEELLKRLEEEDKKLHDDAERALKRSKEEMDKLMRELERLHKEVKDELDRDVREKEEVLRRLEKVLRESRKSLEDSAKKHKDVLDEVKKTLKKLNDENREVLKRIKKELDKTRT

SEQ ID NO: 12663 - protein, 180 aa, Artificial Sequence; identical to SEQ ID NO: 12662
  Synthetic

SEQ ID NO: 12664 - protein, 179 aa, Artificial Sequence
  Synthetic
SEVEKLIEDMKKVAKELADESEEHIKRAEEVIDRLAKEVEKHDRDVEDTIRRLEESDRDKREVEEVLKKIKRSSEELKEKLRRVLEKLRKTSKELEEKLREVLKRLEDRIRKLETEDRSSEEVKKRLREMLEELRRRLERLKDKNKEVLDRLEEKLRKLEKENDDSLKEAEDKLRERER

SEQ ID NO: 12665 - protein, 179 aa, Artificial Sequence; identical to SEQ ID NO: 12664
  Synthetic

SEQ ID NO: 12666 - protein, 179 aa, Artificial Sequence
  Synthetic
SEVEKLIEDIERIIRTLAEEVRRHDEDARRVLEDLARKVRKHNEDVKKVLEDLRESDRDRKFIKEVLERLRKTSEELKRELEEVLRRLRESSKELKRKLREVLKEIKRRAKKLEKDDTSSEEMKERLRRMLKRAEDELRRLEEENDRVVERLERELRRLTEDNKRTLKKIEEDLRRREK

SEQ ID NO: 12667 - protein, 179 aa, Artificial Sequence; identical to SEQ ID NO: 12666
  Synthetic

SEQ ID NO: 12668 - protein, 179 aa, Artificial Sequence
  Synthetic
DEVRDLIRRLEETVKRLADEVREHDKRARDILRELKKEVKETNRRSEKVADDLEKSDRDDKEVDEALDKLRKEYEDLKKRLDDVLEEIRKSSEELEKKLDKVLEEMARLVDKLRRDDTSSEEVKERLKKVLEKLKRDLEKLKEDNRRVLKELEEELRKIKEELDKSLDDLRKRLEDRKK

SEQ ID NO: 12669 - protein, 179 aa, Artificial Sequence; identical to SEQ ID NO: 12668
  Synthetic

SEQ ID NO: 12670 - protein, 180 aa, Artificial Sequence
  Synthetic
SLEEKFRRVLEESKESLERLKRKVEKVLRESEERLKRWLDKVKKVLEEVDDALRRLKDRLDEKLLKRLRDLAREILEEIKRLLDEAKKRHDEVRERVERLLKKVLDDHRRAEERVKREVRTKEIVERLIEELKKLNKELADRLEEIIRRLEEINERLRERIERIITRLRRLLEELEREAE

SEQ ID NO: 12671 - protein, 180 aa, Artificial Sequence; identical to SEQ ID NO: 12670
  Synthetic

SEQ ID NO: 12672 - protein, 184 aa, Artificial Sequence
  Synthetic
SEDEDLKRVLDEAEKRLKDLLDDLRRALKRSEDELRKNNEDLERVLKRVEERLKELLDRVDRDSLKELLDRVREALERLRREVEETTKRVSDEHRRLLEEAERTLEEIRRRLEDLERRVRKKSRRREIVEEIKKRIRDLLRELEKKIEELKTTSERLNREHHKKIEDIKKEIEDLVRELEKKVK

SEQ ID NO: 12673 - protein, 184 aa, Artificial Sequence; identical to SEQ ID NO: 12672
  Synthetic

SEQ ID NO: 12674 - protein, 184 aa, Artificial Sequence
  Synthetic
SLREKLEEVLRRIEEALERIREEVEKVLRDSRDDNRRVLKELKELLERVREALEDLLRKVDRDRVRETLKRVEDRLRELEEEVRRHHKRSEDRHRELEKDLERVLEEVKRRLRKLEKDVEEKSRTDKIVKEIIEELEKLLRDIKKRARELIEESKRINEDNNRRAEEVAEEIRRLLEELERKLR

SEQ ID NO: 12675 - protein, 184 aa, Artificial Sequence; identical to SEQ ID NO: 12674
  Synthetic

SEQ ID NO: 12676 - protein, 184 aa, Artificial Sequence
  Synthetic
SLEEDVKRVLREAEEELKKNNERLRKVIEDSKRDNDRVLDELRKVLEDIEKALRDLLREVDRDRLREDLERVRRRLEELSRRAKEHHKESRKEHEKLRDDARRVTEKVEERLRRIREDLERRSRTDKIVDEVRKEIEKLVRDHHKRIKDLKDDLKRLNDENNKRAKEIIDEMKRLLEEIEKRVR

SEQ ID NO: 12677 - protein, 184 aa, Artificial Sequence; identical to SEQ ID NO: 12676
  Synthetic

SEQ ID NO: 12678 - protein, 182 aa, Artificial Sequence
  Synthetic
KDVEDIKRRIEELNKKLKEKIERIKKRIKELNEEAAKKVEEIKERLKRLLDEIRELVRRDGPREDEIRRLREDLKRLLKEMEDTLKELEDRHERLREEVEKTLRELEKKHKELKEELDRQPVDDSLRKRLEEVLRESKKTAEDLKRDLRRALEESKKNLKRLLDEVRKVIDEIRKALEELER

SEQ ID NO: 12679 - protein, 182 aa, Artificial Sequence; identical to SEQ ID NO: 12678
  Synthetic

SEQ ID NO: 12680 - protein, 182 aa, Artificial Sequence
  Synthetic
SEVEKIKKDIKDLNDDARRRLEEIKRRLEKLLKELEEKHRELKKELKKLLDEVRDLVRREGPREEVLREVKKRLDDVRRENKKLTDEVREILKKLEEEMKRILEELERRHRELKKRLDEEPVDDRLREDAERVLRESKKNLDELEKDVRRVIKRIEDEARRLNEDLKRMLERIKRELEKLEK

SEQ ID NO: 12681 - protein, 182 aa, Artificial Sequence; identical to SEQ ID NO: 12680
  Synthetic

SEQ ID NO: 12682 - protein, 176 aa, Artificial Sequence
  Synthetic
SEEERLEEVLKRVETELRRLKRELEKVLRESEEALREIIKKIEDAVRDNAEKVKKLSRTVDEDLVRELEKLLRDLERKSREAIRRLEELYREVKERVERVTRELEERLKDLERRVKERPVDRRVEKELEDLLRTATKVLEDLKRDLKRLNEETEEVVKTLEDSHRRSNEEVERRVR

SEQ ID NO: 12683 - protein, 176 aa, Artificial Sequence; identical to SEQ ID NO: 12682
  Synthetic

SEQ ID NO: 12684 - protein, 176 aa, Artificial Sequence
  Synthetic
REREELEEVLERSKRELERLVEEIKRALDESRRRLEEIEKRIEEVIRRNKEEIKKLSRRVDEETVRELEKRLRDLERRSKKVLTDLKKKYEEVEREAREVIKELREKYKRLEEEARRRPVDEKLKEELKELNRESRKVVEDLREKLDRLNKDTERVVRELEKEHRKSNEEVRKTVK

SEQ ID NO: 12685 - protein, 176 aa, Artificial Sequence; identical to SEQ ID NO: 12684
  Synthetic

SEQ ID NO: 12686 - protein, 182 aa, Artificial Sequence
  Synthetic
DEEEELKEDIKRILEELRRLAKEHEELNRRINKELEDLVREHKKRLEDALKRLREIVRDRGNDEDVTRRMDEILDELRKHSEDLKRRMDKLLRENEEHSDRLRKRIKELTDRLRRRVEDLVRKRGRVEELEKVLKEAEDDVERIKKRLKRINDESRKHVERLKEELDRADKRIEDEVEKLKK

SEQ ID NO: 12687 - protein, 182 aa, Artificial Sequence; identical to SEQ ID NO: 12686
  Synthetic

SEQ ID NO: 12688 - protein, 182 aa, Artificial Sequence
  Synthetic
RIEERLKRVVDKVDDTLRKSEKHLEDVVRDADRDIDRNRRENEKVVKEAEDILRRLVEEAGRELDDLRRVKKEVDKLLKENEEKLKKVREDIERILRDLKRKHEAVRERLRKLLTDVAREKIPEDKVRELEEEAERLLDELRRKNEEAVRRIKKLLDDLNKHSEETIRRIKKLLKELEDKTR

SEQ ID NO: 12689 - protein, 182 aa, Artificial Sequence; identical to SEQ ID NO: 12688
  Synthetic

SEQ ID NO: 12690 - protein, 178 aa, Artificial Sequence
  Synthetic
STEEKLKELKKEADKLLKELDKELRDNLRRLRKIVEELKKENRDLTRESEEVLKRLNSDDETVERVLRELRERHRKLEEETEEVLRRLERKHDKLREDLKRIVDEIEKKIRDIRRKPVDDKDVKKLIEEIRRILEKAREEVERLSRDSKRVAEELRKRHKELIDRNKRVLEELKRRRD

SEQ ID NO: 12691 - protein, 178 aa, Artificial Sequence; identical to SEQ ID NO: 12690
  Synthetic

SEQ ID NO: 12692 - protein, 178 aa, Artificial Sequence
  Synthetic
SEVEEVARRSRKLNDDLKKIIEELIRRSRKINDELRREIERLIRESRKLNRELEELKRRGELTEEILKKAKEDHERLDRKVKELLKRALDTHRKLTDEARKKLEEVLKRHEDLARKLKDTIEEDKVRRLNEENKESLRRLERELEKLNKENEDSLRTLEELLRELNKENKRSLDELRK

SEQ ID NO: 12693 - protein, 178 aa, Artificial Sequence; identical to SEQ ID NO: 12692
  Synthetic

SEQ ID NO: 12694 - protein, 177 aa, Artificial Sequence
  Synthetic
SLVEEVEERVKKLHDENRELDRKSKRDVEEVHKKNEKLIKDVERTVREMIRKLRELKGTSEETVRRIEEEVRKVRTELEKEMRELSKENEDVARRLREEYKRAEEKNKRAVEEIRKRLLDVEEELRRLEEELRRSIKESREELRRLEDELRRSIEKLEDALRRLAKELDEVIKDLKD

SEQ ID NO: 12695 - protein, 177 aa, Artificial Sequence; identical to SEQ ID NO: 12694
  Synthetic

SEQ ID NO: 12696 - protein, 177 aa, Artificial Sequence
  Synthetic
SLVDEVRRRVDELHKDNKRLDDESEKKVRDAHRENERLDDESRRKVKEAIRKLEELKGTSEETVKEIIKEVEKVVDELRKEYDDLERRNKEVADRLREEYERARKKNEDVLREIRDKLLDVKESLDRLAEKLKKSIKESEDILRELEKRLRDSIRESRKILEDLRRELEEVIKRLED

SEQ ID NO: 12697 - protein, 177 aa, Artificial Sequence; identical to SEQ ID NO: 12696
  Synthetic

SEQ ID NO: 12698 - protein, 177 aa, Artificial Sequence
  Synthetic
SLAEEVEKRVRDLHRKNEELDRESEKKVRDMDRKNKELIKRAEEEVKKVIDKLRKLKGTSEETVRRISEEVKKIVEDLERELRKLEEENRRVVEELRDKYRKLEKENRDMLEDIKRRLLDVEEKLRELARRLKESIRESRERLRRLEKELEDSIRELRRAIDTLTKRLEKAIEELER

SEQ ID NO: 12699 - protein, 177 aa, Artificial Sequence; identical to SEQ ID NO: 12698
  Synthetic

SEQ ID NO: 12700 - protein, 177 aa, Artificial Sequence
  Synthetic
SLVEEVERRVRKLHEENKKLDKESEDKVREANRRNEELIKKVTESVRRMIEKLRRLKGTSEETVRRIKREVEEVVKKLRKEMKDLEEENKRVVEELRKRYKDAKKRNRDALEDIKRRLLDVEEELRRLADELRRSIEESERILKKLEEELRRSIEELRRALEELDEELKRVIRELER

SEQ ID NO: 12701 - protein, 177 aa, Artificial Sequence; identical to SEQ ID NO: 12700
  Synthetic

SEQ ID NO: 12702 - protein, 177 aa, Artificial Sequence
  Synthetic
SLVEEVKKRVDDLHKRNRELDDRSEKMVRKANEENKELDKKSKEDVDRLIERAERLKGTSEETVKEITRDVERVAKRLEDEYRELEKRNREVVRELRKRYDDLEKENRDMLKDIRDRLLDVEEELRRLAEKLKRSIEESREILKELERRLRESIRRSREILKRLKEELERAIERLRR

SEQ ID NO: 12703 - protein, 177 aa, Artificial Sequence; identical to SEQ ID NO: 12702
  Synthetic

SEQ ID NO: 12704 - protein, 177 aa, Artificial Sequence
  Synthetic
SLAEEVEKLVRDLHRKNKELDRRSKKTVEDIEREARELDKRSKEEVERMIKKLRELKGTSKETVDDIEREVREVVEKLRKEYEDLSKKIRDVADKLRDDYRKLEEENRKALEDIRRELLDVEDKLRELEKELRDSIRESREILERLERRLEELIRRSKRILEELERELEEVIRELRR

SEQ ID NO: 12705 - protein, 177 aa, Artificial Sequence; identical to SEQ ID NO: 12704
  Synthetic

SEQ ID NO: 12706 - protein, 177 aa, Artificial Sequence
  Synthetic
SLDDDVEKKVRELDKRNEDLDRKSEKEVEKVHRKNKRLDDESEKEVKRMIEELKKLKGTSEDTVRKIKEEVEEVVRKLRKEYKELEEENEEVVKKLRKEYREAEEENRRMLEEIEKRLLDVEEELRRLAEELRESIERSRERLKELERRLRESIARSREILEELERRLKRAIEDLER

SEQ ID NO: 12707 - protein, 177 aa, Artificial Sequence; identical to SEQ ID NO: 12706
  Synthetic

SEQ ID NO: 12708 - protein, 177 aa, Artificial Sequence
  Synthetic
SLAEDVEEKVKELNRRNKKLDDESKEMVKRAHDRNRELDERSKDRVRRVIEKLRRLKGTSEETVERIDREVKKIVRELKEEYERAKEENKRVVDDLRRRYERLEDENREMLDDIRRRLLDVKEKLEELAERLRKSIEESRDILRRLEKELRDSIKRSEEILKELTDRLRKVIKDLRD

SEQ ID NO: 12709 - protein, 177 aa, Artificial Sequence; identical to SEQ ID NO: 12708
  Synthetic

SEQ ID NO: 12710 - protein, 177 aa, Artificial Sequence
  Synthetic
SLVEEAERRVRELIKELERLDDRSREMVKEMHERNRELIERVEKRVREVIEELRRLKGTSEETVKRISEKVKEILDRLRKLVEDLRRENERVVEELRRRYKEAEDRVKRLLDEIRKRLVRSEDDLRKLAEDLKRVLKRSRDILRKLEEDLRRSIRELEEALRKLEEDLRRAIEELET

SEQ ID NO: 12711 - protein, 177 aa, Artificial Sequence; identical to SEQ ID NO: 12710
  Synthetic

SEQ ID NO: 12712 - protein, 177 aa, Artificial Sequence
  Synthetic
SLKDDVEKKVEDLKKEAKDLDRESDKKVKTAHKRNEELDRKSADDVRKLIRKLEKLKGTSEETVKRIEEEVKEVVRRLREEYKRMEDENREVVRRLEKEYRDLERKIRELLERIKDKLLDVEEELKRLAEELERLIRDSRRILEELKRELKRSIEESRKILEDLERELEKVIRELKR

SEQ ID NO: 12713 - protein, 177 aa, Artificial Sequence; identical to SEQ ID NO: 12712
  Synthetic

SEQ ID NO: 12714 - protein, 177 aa, Artificial Sequence
  Synthetic
SLAEEVERDVKRLDEENKRLDDRSRREVEKMDEENKKLIEDARREVREMIEKLKKLKGTSEETVERIKREVEKVLRELEERVRRLAEKNKEVVERLKKEYEEAAKKNKEVLDDIRRRLLDVDEKLKELAKRLRDSLERSKEELKKLEEELRKSIKELEDALKKLEEDLRDVIRKLEE

SEQ ID NO: 12715 - protein, 177 aa, Artificial Sequence; identical to SEQ ID NO: 12714
  Synthetic

SEQ ID NO: 12716 - protein, 177 aa, Artificial Sequence
  Synthetic
SLVEDVERKVRELDKRNRDLDRKSKRKVEEADKENRKLDEDSERKVRELERKATELKGTSEEAVKRIEDEVREVVRRLRELYKTAEEKNKEVVKTLEKLYRDMERRNKEVLDEIKKRLLDSEESLRRLEEELRKSIKESKEILDELRKELEKSIRESKERLKELEKRLEELIRELKR

SEQ ID NO: 12717 - protein, 177 aa, Artificial Sequence; identical to SEQ ID NO: 12716
  Synthetic

SEQ ID NO: 12718 - protein, 177 aa, Artificial Sequence
  Synthetic
KLVEDAEELVRRLDEENKRLDDDSKRRVEEANRENEKLIKEIEDEVRKMIKKLRDLKGTSEETVKRIEKEVRDVVRDLKRLVDELKRRNEKVVKDLRRKYEEAKRKNEEVLEDIKRRLVRSEEELRKLAKRLKDSIDRSRKILEELERELRRSIDELRRALEELTDELRKVIEELRK

SEQ ID NO: 12719 - protein, 177 aa, Artificial Sequence; identical to SEQ ID NO: 12718
  Synthetic

SEQ ID NO: 12720 - protein, 177 aa, Artificial Sequence
  Synthetic
SLAEEVEKEVKKLDEENRKLDRDSTETVKELNKKNERLDRESKRKVDEVIEKLERLKGTDREIVERIAEEVKEIVKELEEEYRRAKRENEEVVKKLRDEYRRLEERNKKALKDIRDKLLDVKEKLDELADELKKSLDRSRRILERLEEELRRSIRRSEDILRRLKEELERVIRELRR

SEQ ID NO: 12721 - protein, 177 aa, Artificial Sequence; identical to SEQ ID NO: 12720
  Synthetic

SEQ ID NO: 12722 - protein, 178 aa, Artificial Sequence
  Synthetic
SVDEEVEKLLKEHEERIRELIKEVEKLNREHAKRIEELIRKLKETNKRIADKIRDLKRQGRDAKEEVEKELRRLEEEHERVRREVKRSTEELEKRHEDLERRVRKSSEDLKDRLRRLRDGLDEEKLRTIARRIKELNDRFKRAIDESRKHIEELNRRLEKVVEDSRRHLEELADEVRR

SEQ ID NO: 12723 - protein, 178 aa, Artificial Sequence; identical to SEQ ID NO: 12722
  Synthetic

SEQ ID NO: 12724 - protein, 178 aa, Artificial Sequence
  Synthetic
SVLEELKRLLDEHRERLERLIRELRKLNEDHDRRIKELIERLKKLNEDIAKRIEDLKRDGRKVDEEVEEILKRAREEHRRLEEEVRESTERLKRKHDRVKEEVEDSSRELKERLDRLRDGADEDVLRKIEEDIKRLNREVEKAIRESEENIKRTNKRFKDELRKSEKHLEELVKRFRD

SEQ ID NO: 12725 - protein, 178 aa, Artificial Sequence; identical to SEQ ID NO: 12724
  Synthetic

SEQ ID NO: 12726 - protein, 178 aa, Artificial Sequence
  Synthetic
SVLEEVTKLLKDHEDRIREIIKRLRKLNRDIDERIKRLIDEVRKKNDDIRRKIEELKRRGRDRREEVRKDKKDLKKDHDDVRREIDDTLRRAREEHDRVREEIRESSRRIEERLKELKDGLDEERLKRLREELEKLNRDVERVIKESKENLDRTVTEAKRELKRSEDNLERLAREFER

SEQ ID NO: 12727 - protein, 178 aa, Artificial Sequence; identical to SEQ ID NO: 12726
  Synthetic

SEQ ID NO: 12728 - protein, 175 aa, Artificial Sequence
  Synthetic
TEEEILRRVERDLERLNRELERIVREVEKELKKINDDYERVLKKVKDDIDRIREELDRQGVRTEEADERVKELIKKSRDHARRLNEESKKIIDDIRKLLREVHEKSEEIIKEMRRAKLSDKELEELLKRWEEDVKRIVEEVKKLLDEWRERVKRAKDENEKLLRDLEKLVEDLAR

SEQ ID NO: 12729 - protein, 175 aa, Artificial Sequence; identical to SEQ ID NO: 12728
  Synthetic

SEQ ID NO: 12730 - protein, 175 aa, Artificial Sequence
  Synthetic
SKEDVLREVKRELKRLLDDNRRMLEEVEEAARRLNKDYNDVLKEVEEEIEKIIRELEKKGKKDERVDRRIEELKRDSRRHAEKLHDDSRKLREKLKEIHDKLKRDLDELRKRMDDADLSEEDLKRLLDEVRRLSEKTKEDLERILRKWKEDVERAKERNRRELERLEREIKELAR

SEQ ID NO: 12731 - protein, 175 aa, Artificial Sequence; identical to SEQ ID NO: 12730
  Synthetic

SEQ ID NO: 12732 - protein, 178 aa, Artificial Sequence
  Synthetic
ELDKIVEEVRKALREILEDYKRFSKEIHDRDKELADRLREILKDVKRAVDELIKKLSRTKELEETARRLEKRIEELRKEVEDHLKKSEDRNRELKEELRDTLRRVEETIEEIRRRGEPVEDVVRKLRELLERFRKKAEDLKEENKRINEENERKIREIVKTLRKLLDELREKLERTKK

SEQ ID NO: 12733 - protein, 178 aa, Artificial Sequence; identical to SEQ ID NO: 12732
  Synthetic

SEQ ID NO: 12734 - protein, 178 aa, Artificial Sequence
  Synthetic
SLEDTLRKVDKDLKDNMRRLEETAEKVRRDIDRDEERLRRISEELHRRIEELIKRLSRDERVKRKVEELKKRNEDNEREYKDTVRRIKEEIKRLEDEYKKHLEDVARRLEEIRRRGEPVEDVVRDAKRLLDEHHDLARKIVEDLRRLLEDLHRKSKKSVEDNERLLKRMEEILRETER

SEQ ID NO: 12735 - protein, 178 aa, Artificial Sequence; identical to SEQ ID NO: 12734
  Synthetic

SEQ ID NO: 12736 - protein, 171 aa, Artificial Sequence
  Synthetic
SELEEVARRVEKLLEKHKEDLKRLLEKSEEDLRRAEEEVKRLLEEIREELDRLRKRNVDRETVKEMEKKLEEKIKRLEDMLRRLEERDEELNRRSEEHNKELRKEIEDLLRKLPEDEEIKKVRKKVEDVHEESKRLNEENRRRTKEVSDKIREIIKEIRKEIKKASDELEK

SEQ ID NO: 12737 - protein, 171 aa, Artificial Sequence; identical to SEQ ID NO: 12736
  Synthetic

SEQ ID NO: 12738 - protein, 171 aa, Artificial Sequence
  Synthetic
DELERAVEEVEKRLREHLERIKRLLEESRELLKRHEKLLEDVLRRIRELLKRAEDRRIDEETVRRLRKEIEDLERELEKHNRELRKRDEDLNRESEEHNDKLRREIEELERRLRDDELIKRVKERVKEAHKRSRELNERNRRETEKMHKKSRDLLRKIREEVDRMSDKLRK

SEQ ID NO: 12739 - protein, 171 aa, Artificial Sequence; identical to SEQ ID NO: 12738
  Synthetic

SEQ ID NO: 12740 - protein, 170 aa, Artificial Sequence
  Synthetic
SEEELLRELEKKLRELRRKVDETLRDLRRRLKELEEDHRRTLEESERHLREVEKKLSRTRELERLAEELERRHRKASEEVKKRLTDLKRDLDRLKKDIDERLERLRDELRKRRVDEKLDRRVEELIKEIEELLREVEKLVEDLIRTIKKLNDDLREDNKRLAKEMEDRAR

SEQ ID NO: 12741 - protein, 170 aa, Artificial Sequence; identical to SEQ ID NO: 12740
  Synthetic

SEQ ID NO: 12742 - protein, 181 aa, Artificial Sequence
  Synthetic
SAVEDLEREVRKLIRDLEDLIRRLEERNKRIAEEIEKLNEELNRENKRIADEIRRIKDERGTDEEVAERIKRLLDDAARAHRELDREVERLLKEAEDEHKKLADEIRKLLARVDKALKDLRKDVSEEALERLKRELRKLAEELKKVLKRSRDHLKEVKRRHDENIKRSDDHLKRVADEARK

SEQ ID NO: 12743 - protein, 181 aa, Artificial Sequence; identical to SEQ ID NO: 12742
  Synthetic

SEQ ID NO: 12744 - protein, 181 aa, Artificial Sequence
  Synthetic
SVAEELEKDIRRIEEEIKELLERHRELNERIVREIEDLNRKLNEMNKRVVEELRKVKRDRGTDEEVEKRIRDILDKLRRLHRKVDREVEELLRALEEHAKELERRIRELLKRAREKLEELRKDVDDRVLKKLEKRLRELEEEAKKLLKESKEHVDEVRKRHEENIRRSEEHLRRVLEELRR

SEQ ID NO: 12745 - protein, 181 aa, Artificial Sequence; identical to SEQ ID NO: 12744
  Synthetic

SEQ ID NO: 12746 - protein, 181 aa, Artificial Sequence
  Synthetic
SVVEELERRIEEIAREIEELNERHNRKNKEIADRIRDLNRRLNEANKKIVREIEEIKRRDGDDEDVRREIRELLERLKELHRRVDRKVKELLDELEKHLREVDRRVEELLRRARKTLEDVRKDVDSRVLDKLRKELDDLRRRHEENVDRSRKHLEEVRKEHEENIKRSERHLEEVKKEAER

SEQ ID NO: 12747 - protein, 181 aa, Artificial Sequence; identical to SEQ ID NO: 12746
  Synthetic

SEQ ID NO: 12748 - protein, 181 aa, Artificial Sequence
  Synthetic
SVVETLEKRVRELIETLERLIERLDRENKRVAEEIKRLLDEHDKTNKEIVERIRDIKRREGTDERVRTEIEELLRRLEAHVRELKKTIEDLLRKLKEMHDRLREEIRRLLEEARKELEDLRKDIDSRVLRKLEEELRKLEEKLRKLLKDSEDHLREVLERAKRVLDDSRRHVDEVRREAEE

SEQ ID NO: 12749 - protein, 181 aa, Artificial Sequence; identical to SEQ ID NO: 12748
  Synthetic

SEQ ID NO: 12750 - protein, 181 aa, Artificial Sequence
  Synthetic
SVMEDLERRIREIIKEIEKLLEDLKRENRRVAEEIERLNREHNELNKRIAEEIERIKRRRGRDEDVSERIRELLEALKEHLRRLDEEVRRILKRLEDLHRELEKRIRELLKRAEDELEALRKDVDSRVLKKIEDELKKLEDKAREVLKRSRDHLKKVEDDHRENVRRSEEHVKDVLRRFEE

SEQ ID NO: 12751 - protein, 181 aa, Artificial Sequence; identical to SEQ ID NO: 12750
  Synthetic

SEQ ID NO: 12752 - protein, 181 aa, Artificial Sequence
  Synthetic
KVLEDLDRDIKRIIDEIRRLNEELNREIEEIKRRIKRLNEEHNERNKRLAEEARRIKDERGTDEEVLKRIKKLLRELEEHLEKLDEDVKKLLREAEESIRELDERVEKLLREIRKLLEDLRKDVEDEVLKRLEEKLERLREEHERNAREIRKELEKLEKEHRENVERSRRHVERVEREFET

SEQ ID NO: 12753 - protein, 181 aa, Artificial Sequence; identical to SEQ ID NO: 12752
  Synthetic

SEQ ID NO: 12754 - protein, 181 aa, Artificial Sequence
  Synthetic
SVVERLKEIAEEIIRRIEELNKEHNKRNREIAETIERLNREHNELNKTLVREMKEIKRDKGKDEEVTKTIEKLREELERHLDKLDKDVKKLLDDLRRHNRELDREVRRLLEELRKLAEELRKDIESEVLKKIEEDLRRLLRKHEENSKESEKHVEEVEERHRRNAEDSKRHVEKVKEEVDR

SEQ ID NO: 12755 - protein, 181 aa, Artificial Sequence; identical to SEQ ID NO: 12754
  Synthetic

SEQ ID NO: 12756 - protein, 185 aa, Artificial Sequence
  Synthetic
STEEVLKEIRDRLEELKREAKKVNDDTRERLKELEERNRRANEESKRRLEELERRVEERGTSEDMRRELERLRREADKTNEDDKRRTEELSKEVEDTNKRHEEELERLLTEVEKSLRRMEEENSEDERLLRELRRKLKEVEDTIRELNERLRKRIREIEEEVRESNERLRKKLREILEEIKETEK

SEQ ID NO: 12757 - protein, 185 aa, Artificial Sequence; identical to SEQ ID NO: 12756
  Synthetic

SEQ ID NO: 12758 - protein, 178 aa, Artificial Sequence
  Synthetic
SVVEEIDKIIKRIADRVRKIIEDLERLNKEIADLLRRIIEELKRLNDRIREEVDRLRRRGRDEEKKLADLIRTIAEVHKRAKEDIDRIAEKLRRAHTEVEKEVRKLEKELRDILRKVRDDVDEKVLEDVERKLERLKREVRRVLEESRKRLKEWKDRAREVLEESKRSLEEISRRLRE

SEQ ID NO: 12759 - protein, 178 aa, Artificial Sequence; identical to SEQ ID NO: 12758
  Synthetic

SEQ ID NO: 12760 - protein, 178 aa, Artificial Sequence
  Synthetic
SADETLRKVVEEVARKSEKLNKELEKVNKDLARAVEELIEELKDVITKIEERAKRLKDRGEPLEEEVRKLKEEVRKILKELEDRLRELEKRARDIHREVKKTDEDLRRRLEELLRRVKDRVDERVLEEIRERIERLNKRNKEVLDRSEESLRRLAEKLRRVIERVEEKLRKIEEDLKT

SEQ ID NO: 12761 - protein, 178 aa, Artificial Sequence; identical to SEQ ID NO: 12760
  Synthetic

SEQ ID NO: 12762 - protein, 175 aa, Artificial Sequence
  Synthetic
DKEDAIRTAEKRIRDSERENEKVDEDYRRELKRSEDKNEKADKEYKRRIEELVRRLLETRGREDEELRKLTEDSKRLSEENKKIVEDLKRDSEELLKRNEKLLRELKEEVREVKKEGRDEDTLRKLVDDIEERNRRIIEELKRHLDKLREDNERVIEELKRHLEEVAREVERRRK

SEQ ID NO: 12763 - protein, 175 aa, Artificial Sequence; identical to SEQ ID NO: 12762
  Synthetic

SEQ ID NO: 12764 - protein, 172 aa, Artificial Sequence
  Synthetic
SEKEEAEKLLREHHEKIKRLKEESKRINDENRKRIEELKRRSREINKELEEKVRRNDKDRKVIEKTLEEIERKHDELLKDAEDHHRRSEERHRELEDRVRKETRKVEDKLRKDGLREDTVKRIEDELKKNLDDLRRVLEKSKDDNRKLLEDLERELRESKKDARRLLEEVRK

SEQ ID NO: 12765 - protein, 172 aa, Artificial Sequence; identical to SEQ ID NO: 12764
  Synthetic

SEQ ID NO: 12766 - protein, 172 aa, Artificial Sequence
  Synthetic
SKEEELEKLLREHHEKIKRLKEESKRINDRIRRTVEELIKESEKINRDINDTVRKNDRDEKVIRRLLEDVRRKHEELRERLKRELDKVRERHKELLDRARRATERVKERLDRAGLREDSVERIKRELERNLDDLRRVLKESEDDLREILRRLKEVLEESERDLERVEREVRK

SEQ ID NO: 12767 - protein, 172 aa, Artificial Sequence; identical to SEQ ID NO: 12766
  Synthetic

SEQ ID NO: 12768 - protein, 176 aa, Artificial Sequence
  Synthetic
SELEELLERLERLIEENRRELEELIRELKEESDRTREELKRLIDRLKEKIDRVLKLKEDGRSREEEVRKIEEDIKKEIREMEERHEETKKRIEEKKKEADERHEELRERIKKEERDIPVDKDVLKEARERLRKLHEETKEAKKDLDRILDENEKEVKEVKKRLEDLLKELRDRLRK

SEQ ID NO: 12769 - protein, 176 aa, Artificial Sequence; identical to SEQ ID NO: 12768
  Synthetic

SEQ ID NO: 12770 - protein, 171 aa, Artificial Sequence
  Synthetic
SELEEVLKRIREEAERLMRRNEETLRRVKKTIEDLLRRNEKRLEDVKREADEIEKRKLDEDEVRKEDKRIEEEIKKLSDDSRDMERRIEEEIRRLEEDHKKKRRDTRERLKKAKLSERVKEEIERIEKRVREVHEEVNKRIEDLRREYRKEHKRVEDEIRRILREVREKRR

SEQ ID NO: 12771 - protein, 171 aa, Artificial Sequence; identical to SEQ ID NO: 12770
  Synthetic

SEQ ID NO: 12772 - protein, 179 aa, Artificial Sequence
  Synthetic
SEKEEVKKESEKLSRDTKKRSDEVHKEIKRLTDETERELREVEKEIERLAEELRRQNSVDERLAEELEREREKLREDLRRLKERYDRKLEELKERNKKEKKEYEDRVERTRDERDRNDTSEKVLEDELRENKKENKDLKERHDRTLEEVERTNRKVKEELRRVLRRVEESVREVAERAT

SEQ ID NO: 12773 - protein, 179 aa, Artificial Sequence; identical to SEQ ID NO: 12772
  Synthetic

SEQ ID NO: 12774 - protein, 186 aa, Artificial Sequence
  Synthetic
SKEETIEKRVEELKRENDEKVERIKREIEDLIRRNKELLERIKKEVRELLKELKDRAEKKGTSEDERRKLEDMERRIREKERKSEEDHRREEERLREETKRSEDRTRDLKRKIEEDERRLKKKDGKDRELDKALEDIERRIREHNKELDDELRKVREDSRRHLEKLKRELEEIREEARRITEELKK

SEQ ID NO: 12775 - protein, 186 aa, Artificial Sequence; identical to SEQ ID NO: 12774
  Synthetic

SEQ ID NO: 12776 - protein, 182 aa, Artificial Sequence
  Synthetic
EEKELLDKLKEDADRIKKELEDTLRELKKKHDDVNDRNRKHHEEVRRRAEKIKDKLRRDKVDEDEKRRIEEELRRLDEKSKKDEDRLKDEHEEITRELEKKKRDTRERIKKIRKDTEDKLRTKGTTGEEVRKRLDDLEREIKKIIDEIDERHRRLTEENKRSLDRDREELEKLKEEIKRTAD

SEQ ID NO: 12777 - protein, 182 aa, Artificial Sequence; identical to SEQ ID NO: 12776
  Synthetic

SEQ ID NO: 12778 - protein, 175 aa, Artificial Sequence
  Synthetic
DEAEKIKEDAKRLIEENDEIVRRIEEEMKKSHKENREILKKIKEDVDRSHEDLRRRSGDTDELREDKKKNEEDARRTEEDTRRAEKENKEETDKMRRDTEEDRKELKRKLDEVRKKGFREEVLKDLRRRSEEHKKKLEDDLRRHEKKSRDHKEKLKELLERHKRRVEEVRKRETK

SEQ ID NO: 12779 - protein, 175 aa, Artificial Sequence; identical to SEQ ID NO: 12778
  Synthetic

SEQ ID NO: 12780 - protein, 182 aa, Artificial Sequence
  Synthetic
SREELMEELERLLERLIREIEKASRENEERVKELKREIEESTKRNKETAKKLLDELTRSNSDEKVKRDLDRRLKELKDRNRKEEEDTKRRLEKLEKDNRDRERETDEREKEITRKVEEDVRREKKPKDELRKTLEDIRRRVEEAKERHRRILKTIKERSEKLTREHRKVNEDIEEKLRRAKK

SEQ ID NO: 12781 - protein, 182 aa, Artificial Sequence; identical to SEQ ID NO: 12780
  Synthetic

SEQ ID NO: 12782 - protein, 176 aa, Artificial Sequence
  Synthetic
SERETVERVLDRLREELEKIKKELEDVNRESKKEVERLLRRNEELHKKVEKDARDILRKKGETREDVRRELEKERRRSEDESRRLKEEDEREKKKSEERMRELDKDVKRKEDELRKKDLVGEELKKTLDKILEDAKEEVREDRKRNEKLNRELEERSRRNEEDLRRLLKKLKDEAD

SEQ ID NO: 12783 - protein, 176 aa, Artificial Sequence; identical to SEQ ID NO: 12782
  Synthetic

SEQ ID NO: 12784 - protein, 173 aa, Artificial Sequence
  Synthetic
DEKETIEERRKEIEKIIKDLEKNVRDHEKRIEEIIKEIRDNTEKLKKEAEDLLRRIRKEGNRDELRRRKEKRDRDSRRRMEEIKKRTDELAREHEETKRKIKEEEDERKERTKGKPTSRELEETLRRLDERTKKVIKEAEDVHRRLRERLRKIEKEHEDTLRELKKRLDDEAR

SEQ ID NO: 12785 - protein, 173 aa, Artificial Sequence; identical to SEQ ID NO: 12784
  Synthetic

SEQ ID NO: 12786 - protein, 186 aa, Artificial Sequence
  Synthetic
SAEDRLREADERYERELRRLKRELEEVIKEYRKAIEELKKELEDVLRRFREELKRLEEEKGTTSKEMDELKKRVEEEERKKKEEIDRNREENERRLKKVEDDTTRKEEDNRRRRKKVRDDITRRKGSGEEVREIIERLKESLKRNEEDVRRLIRRLKEELKRNKEEVERLKKELEDILRELADRAR

SEQ ID NO: 12787 - protein, 186 aa, Artificial Sequence; identical to SEQ ID NO: 12786
  Synthetic

SEQ ID NO: 12788 - protein, 186 aa, Artificial Sequence
  Synthetic
DAERELKKVEDEYEKRIRDLERDLRRVLEEYERAIEELKKELDDVLREAEKALEDLLRKKGENSEEVKEEEDRVRRKLERVREETKKNKRENDERLKRTREEMDENRKRNEKKRREVRDKIEKDKGSGEEVKEIKKELEESLKRNEDKVRELKRRLEELLKENEKKVRELIRRLEEELRRLAERTR

SEQ ID NO: 12789 - protein, 186 aa, Artificial Sequence; identical to SEQ ID NO: 12788
  Synthetic

SEQ ID NO: 12790 - protein, 186 aa, Artificial Sequence
  Synthetic
SAEEELKKVDDDYEREIRRLEKELEDVLRDVDRDHRRLEEELKKVIRDIEEALKDLLRKKGEETEELKKMAEDVRRRLEEVRRRIEKDKEDNKRKKEEIEKEIRDNREKNKRDRDRTRDKIRKDKGRGEEVREIKERLRKSLEDNERKVKEIIDRIREDLKENRDRVRKLIKDLDDELKELAKKAK

SEQ ID NO: 12791 - protein, 186 aa, Artificial Sequence; identical to SEQ ID NO: 12790
  Synthetic

SEQ ID NO: 12792 - protein, 179 aa, Artificial Sequence
  Synthetic
DEEREIEERIKRILEDLKRNLEDNERKIRKIVKDNRENNKRNEDKIRRILEELKRAKEEGNLTDDKLRRTEEETKRNSERNEEESRRTEDRERRNTERNEKKERDTREETKKDRERLRERGVETERVRKLEKDLEKALEEIRRRYEELLKRLKRENEESKKTYDKLIEELRRAAREIKR

SEQ ID NO: 12793 - protein, 179 aa, Artificial Sequence; identical to SEQ ID NO: 12792
  Synthetic

SEQ ID NO: 12794 - protein, 179 aa, Artificial Sequence
  Synthetic
DEKERIEEEIRRILRELEELTERNEKKIRDIVREIRKNSEENRRKIEKILEELEELKKEGSNTEETAKRKREEVDRNRRRNEEKARRIEEELRRNKEENDKRLEDTERELEKRRRDVRRRGVEDEEVEELLRRLRKRLEDLERRNKELLEELKERLERAEKRNRDLLKELEDALERIRK

SEQ ID NO: 12795 - protein, 179 aa, Artificial Sequence; identical to SEQ ID NO: 12794
  Synthetic

SEQ ID NO: 12796 - protein, 179 aa, Artificial Sequence
  Synthetic
DEEEEIEKKLRKNIRDAEEKTKRNKERAEDNLRKARENSKRNEEDIRRKLKRLKELKEEGNQRDEDDRRTREDSKRNEDDNDRKRRESEKDHKRNREKNKEDKERSRKRHEEETEDLKKKGLRTERVDRLKKELERMHRKLDKENRDIEKRVREEHRRLTERNRKLLEDLEEALERIRT

SEQ ID NO: 12797 - protein, 179 aa, Artificial Sequence; identical to SEQ ID NO: 12796
  Synthetic

SEQ ID NO: 12798 - protein, 179 aa, Artificial Sequence
  Synthetic
SEEEEIERRLRDNIRKAEENTRRNKEKIDRILEEMRENSKENKRRIEEILDELRKLKEEGNLTEEEAKRVREELERNKRRNDEKLERKRKDIDDNERRNREKEEKSRRDHEEETKELEKRGVRTERVDELKEKVERDHERLRKENEDLLRELRKRLDELRRENEKLLRELEEALDRIRK

SEQ ID NO: 12799 - protein, 179 aa, Artificial Sequence; identical to SEQ ID NO: 12798
  Synthetic

SEQ ID NO: 12800 - protein, 184 aa, Artificial Sequence
  Synthetic
SELERVREEIRRLERENEETLREVEEKIRKLLEENREALERVEERVRRVKEELKEVRRRQLDREELKKVEDELRRREEKIRREEDERRRRSEEDRKEEEKRTRRRSEDSERKREKTRRDISRVKDDDVRRDIERLDEEYERRHKDVNRKLKRLDDEYEKATRDVRRRLEELTKELRDEAEKVRK

SEQ ID NO: 12801 - protein, 184 aa, Artificial Sequence; identical to SEQ ID NO: 12800
  Synthetic

SEQ ID NO: 12802 - protein, 175 aa, Artificial Sequence
  Synthetic
SERERVDRLEERYEEESRRVEEELRRLLKRYEDFHRELRKRLEDIVREVRKTLKELEDRIDEEVVRTTEKRLEDLRRDLERRSRETEKRLKEIEDRLREEKEKSERDRERTKKLEDEIDTREIEKRVERLLEENEERLRRVRKEIKKALDENREILKEVEDRARKILEELRRKAK

SEQ ID NO: 12803 - protein, 175 aa, Artificial Sequence; identical to SEQ ID NO: 12802
  Synthetic

SEQ ID NO: 12804 - protein, 185 aa, Artificial Sequence
  Synthetic
SELEEVKRRVEEIKKKLKEDLDDHKRRNEKHIKELEDRLEEHRREIEELVRKLEELKRRNVDEETMKRVKEELEEMARRSKEREKDLRRRSEEAHRKSERDLEEAEKKLEEERKRIRDRARRRNSDEEVRKALKELEDDLRRVLEEIKRAHKKSKEDNKRVLDDLTEKHKRSEEELRDVLRDLER

SEQ ID NO: 12805 - protein, 185 aa, Artificial Sequence; identical to SEQ ID NO: 12804
  Synthetic

SEQ ID NO: 12806 - protein, 185 aa, Artificial Sequence
  Synthetic
SSLEELEKRNRERIEELERTLRELEERSRELNERLKRELDEHKKRIDELLEELRRLKEENVDEETLKRIEEKLRRDLRRSKERLREIKERLEREHKKIDDRKRERDKKSEKDKKDEREEVRRENSDEEVRRALEELEKSHDEVRERIKRRLDESKERNKRALEKIKRDHEESEERLRRALDRTRK

SEQ ID NO: 12807 - protein, 185 aa, Artificial Sequence; identical to SEQ ID NO: 12806
  Synthetic

SEQ ID NO: 12808 - protein, 185 aa, Artificial Sequence
  Synthetic
SSLEEVKKENEKLIKELKEELDKIRKENEEHIEKLERELERVKREAEKIKKKLEELKRENVDEKTLRELEKELRDRARKTKKETDELRRESEERHKRTDERERRLEEKSRRDERRTEDRVRREKSSKEVKDALEELKRSHRKVAKEIKEAVKESRKKNEEVAKKIKKALDELKRELDEALKEAKR

SEQ ID NO: 12809 - protein, 185 aa, Artificial Sequence; identical to SEQ ID NO: 12808
  Synthetic

SEQ ID NO: 12810 - protein, 183 aa, Artificial Sequence
  Synthetic
DEVETLEERVRRLKKELRDELKRNEDKVRKLKRELEESLKENAKKVEEVERDLERVKREGSDREEKRDERRRRTDKNREDNREDERRKEEDTEKNERDNERRTREVKRTADEDEKDLKRSNRETDEVRREIERLKRELERVIREYREAIERLKRDLKRAIDKYREDIKRLEEKLRRVDKELEK

SEQ ID NO: 12811 - protein, 183 aa, Artificial Sequence; identical to SEQ ID NO: 12810
  Synthetic

SEQ ID NO: 12812 - protein, 179 aa, Artificial Sequence
  Synthetic
SEVERVREENKRSEEKLKKLLEDSRRNLEENRKRLEELLRKSEENLERLKRELDELRKQNIKDSRDEKRTKDRLDRHREEVKRAEDRSREEHKRHKERVEREERKEERRNEEEEEDLRRKGVETEDLRRNRETNEELRDRVRRTHEKLEREAEKVHEDVRRRHKELEDEVREVLKELRR

SEQ ID NO: 12813 - protein, 179 aa, Artificial Sequence; identical to SEQ ID NO: 12812
  Synthetic

SEQ ID NO: 12814 - protein, 179 aa, Artificial Sequence
  Synthetic
SDEELIKRIREELERLLKELRDTIKEVEDRNRESLEDLDRVHKRIKEEIERLEKDLDVEEELLKRMREELTELHKENKERKERDEEKNRRVRERLEEEERKEEKEIRDVEREDKDSDRPSEELAKKLKDELRRAKDKVEEIKKRIRDTLEDNRKKAEELKRKNEEDLRRFEKKAEDVRK

SEQ ID NO: 12815 - protein, 179 aa, Artificial Sequence; identical to SEQ ID NO: 12814
  Synthetic

SEQ ID NO: 12816 - protein, 172 aa, Artificial Sequence
  Synthetic
SKEDKAREDVKRTIEELKDRNRKLNDKIRKTIEDLERRNEELNKENKDLVDELRDGDRRDEEIRKRSTEYRKRTEETDEEVERTERELRKELRDEDRKLKRRKDEIERKIREDNLPEEVLRELREEIEKLEKEHRDNVRKLERDLDRLRKKHEDNKERLERHTRRVEEEKRR

SEQ ID NO: 12817 - protein, 172 aa, Artificial Sequence; identical to SEQ ID NO: 12816
  Synthetic

SEQ ID NO: 12818 - protein, 179 aa, Artificial Sequence
  Synthetic
STEEDVRKIVDDARRNLEENKRRIEKIVKELEDKLRENEKKIRKILEDIRRLLEKFKRDDDKREEVEERIRTTKERTEDDTRRNTEENKKTSERKKKEIDDNSRRNEEKRKRIEDKERRDNLPEDIMRDLRRRLERIAREYKRLLDELKKRLDDIKKTYEDLLRRLREEIERAEEKARR

SEQ ID NO: 12819 - protein, 179 aa, Artificial Sequence; identical to SEQ ID NO: 12818
  Synthetic

SEQ ID NO: 12820 - protein, 179 aa, Artificial Sequence
  Synthetic
DEEEEVRKILEEIKKELDDNERRIRKNIRDAEETLRENEKRIRDILKEIEDLLKELKDRDDKREELEERIRREAKKKREELKRNEEDNERRREKSEREHRENSKRNKKRRDDTEERERRANLSEDILEKLRRDIERADEEYKRLEEELRRKHDEIRKTYEKLLKELEEAIERVEREAEK

SEQ ID NO: 12821 - protein, 179 aa, Artificial Sequence; identical to SEQ ID NO: 12820
  Synthetic

SEQ ID NO: 12822 - protein, 175 aa, Artificial Sequence
  Synthetic
SSKDLLEELRRTVEEVRKRSDDLSRESEEATRRVRKEHDRINKEVEDELRRVREDGERPKEAEEEAKEIRKKTEKETRDIREEIKRLRDEYEKTKKRLEDEKKKLEEDTEEIERRGSVSEDIVREMRKRLEELLRENEKRNEELLRRLKELLDRSRERVREIEERLRELLEEVRR

SEQ ID NO: 12823 - protein, 175 aa, Artificial Sequence; identical to SEQ ID NO: 12822
  Synthetic

SEQ ID NO: 12824 - protein, 182 aa, Artificial Sequence
  Synthetic
DAEKLKRDYEEKSRRVKETLDDLVRRYREEHRRVNEELRKLLEDLKKTVEDVEKEEGSSGEKARELEKTKKTLEEELKRIEEEVKEISERSKEKEERIKKEVKEIRDKSERDKKEIDDKRIDSERLEREIRKLEEENKRTLERVKEKIERLLEENEKVLKEVRDKVKTIKDRLRKLVEEIRR

SEQ ID NO: 12825 - protein, 182 aa, Artificial Sequence; identical to SEQ ID NO: 12824
  Synthetic

SEQ ID NO: 12826 - protein, 175 aa, Artificial Sequence
  Synthetic
SVEDEVRKIKRRLEEALERSEKKVRDMVRRNKEFLERAKRRVEEVVKENERALEEVKRRGNGEKELEDLHRKNREDKERERKDARKLHEDNRDEHRKHEEELRKLRRDLERKEKDADIDEEILRRVRKTVKDVEDTLKELNDRLEKIHREVKKELDRLLKELDDRHRKVAEDLKK

SEQ ID NO: 12827 - protein, 175 aa, Artificial Sequence; identical to SEQ ID NO: 12826
  Synthetic

SEQ ID NO: 12828 - protein, 180 aa, Artificial Sequence
  Synthetic
SVEELLRKLEEVLRKIREENERSLKELRDRAREIVKRNRETNRELEEVIKELEKRLSGADKEKVEELVRRIRRIVERVVEEDRRTVEEIEKIAREVVKRDRDSADRVRRTVEDVLRKATGSEDIVRKIERIVETIEREVRESVKKVEEIARDIRRKVDESVKNVEKLLRDVDKKARDRKK

SEQ ID NO: 12829 - protein, 180 aa, Artificial Sequence; identical to SEQ ID NO: 12828
  Synthetic

SEQ ID NO: 12830 - protein, 172 aa, Artificial Sequence
  Synthetic
DEVEKVLEEIKRALDDLRKKVEESKREIKEALKAVEKHTRDSDTANKRTLAEIERGVKSKDTERVRKLVEELSEENERSLREVRRVAEELLEINERVLEEVERVVEALLDLVRRGGSERVVEEVRRVLEELRRRLEKVTEDSRRAIERLAREDARVSKKSIDVNKKLDDDVR

SEQ ID NO: 12831 - protein, 172 aa, Artificial Sequence; identical to SEQ ID NO: 12830
  Synthetic

SEQ ID NO: 12832 - protein, 178 aa, Artificial Sequence
  Synthetic
DAEELVRELEERIKRSHERLEELLREVKRLIERSHEELKRLNEEVLRELDRVLDEVAKRGSDSEELLRELEERVARIKERSKESYARSKESLDRAKEVLEELYRASKRSLEEFERELREKGVDKDSARELERIVKENAELAERVFREVEKIVRENTKLAEDSVRELKRLVEELKKRAK

SEQ ID NO: 12833 - protein, 178 aa, Artificial Sequence; identical to SEQ ID NO: 12832
  Synthetic

SEQ ID NO: 12834 - protein, 177 aa, Artificial Sequence
  Synthetic
SAADEVVERMKELVATVKRENDEVVKELKKLVKELEDDNRRVVEESKKSVEDLARRVGKDKREVVEEVRRTSKELVERNEETAKRVDDLVRRLVEENRRSVTEVEELVKELVKELRRGSGSEDLVREVEKRVRDIVEESRKLAEETRKAVEDIIEKSKRIAEDTLEKNKEMVERLER

SEQ ID NO: 12835 - protein, 177 aa, Artificial Sequence; identical to SEQ ID NO: 12834
  Synthetic

SEQ ID NO: 12836 - protein, 174 aa, Artificial Sequence
  Synthetic
SESDEVIRDLARLLDELARHVDDSVRRMDEVVKRSTREADELAKRLDELVKEVEKKPGDERVERMVAEIERLVAEVLEELKKKYEKLKREVEENLRRLEETVRDIVEKARKVTEKGVSKEKIDRIIRELERILEEAKKKHEDVLRRLEDSLRRVAELLKAALDRLREIVDRLRR

SEQ ID NO: 12837 - protein, 174 aa, Artificial Sequence; identical to SEQ ID NO: 12836
  Synthetic

SEQ ID NO: 12838 - protein, 174 aa, Artificial Sequence; identical to SEQ ID NO: 12836
  Synthetic

SEQ ID NO: 12839 - protein, 174 aa, Artificial Sequence; identical to SEQ ID NO: 12836
  Synthetic

SEQ ID NO: 12840 - protein, 174 aa, Artificial Sequence
  Synthetic
SESDDVIRKLRELLEELRTHVEKSIRDLRKILEDSTRHAKRSIEELERLLEEVRKKPGDEEVRKTVEEISRRVAENVKRLEDLYRRMEEEVKKNLDRLRKRVEDIIREVEEARKKGVDEEKLKDLIRKLRDILRRAAEAHKKLIDDARESLERAKREHEKLIDRLKKILEELER

SEQ ID NO: 12841 - protein, 174 aa, Artificial Sequence; identical to SEQ ID NO: 12840
  Synthetic

SEQ ID NO: 12842 - protein, 174 aa, Artificial Sequence; identical to SEQ ID NO: 12840
  Synthetic

SEQ ID NO: 12843 - protein, 174 aa, Artificial Sequence; identical to SEQ ID NO: 12840
  Synthetic

SEQ ID NO: 12844 - protein, 178 aa, Artificial Sequence
  Synthetic
DREREVKKRLDEVRERIERLLRRVEEESRRVAEEIRRLIEEVRRRNKKVTEEIRELLKGLKDKEEVRRVLERLRKLNAESDELLERILERLRRLVEATNRLVKAIIEELRRLVEKIVREVPDSEELREELKKLERKIEKVAKEIHDHDKEVTERLEDLLRRITEHARKSDREIEETAR

SEQ ID NO: 12845 - protein, 178 aa, Artificial Sequence; identical to SEQ ID NO: 12844
  Synthetic

SEQ ID NO: 12846 - protein, 178 aa, Artificial Sequence; identical to SEQ ID NO: 12844
  Synthetic

SEQ ID NO: 12847 - protein, 178 aa, Artificial Sequence; identical to SEQ ID NO: 12844
  Synthetic

SEQ ID NO: 12848 - protein, 181 aa, Artificial Sequence
  Synthetic
SEVDEAVKNNEEDAKESRRVVEEAVKRDEDIARDIERAAREVVERDKEIVDEVRRGVKDEKKLREVVTLSKKIVDETKEIADRVLELSKRIVKETRDIAKRVLKLNDDSVKDVRRIAREGRSKETKDLLDENSKRSNEISREVKKDLERTVRENKKIVDEVAKALEDTVDKNRRIVEEVTT

SEQ ID NO: 12849 - protein, 181 aa, Artificial Sequence; identical to SEQ ID NO: 12848
  Synthetic

SEQ ID NO: 12850 - protein, 185 aa, Artificial Sequence
  Synthetic
SEAEELLKRLEDRAEEILRRLEEILRTSRKLAEDVLRELEKLLRESERRIREVLEELRGIKDKKELEDVIREVEKELDESLERSRELLKDVLKKLDDNLKESERLVEDIDRELAKILEDLKKAGVPKEVVDEIKRIVDEVRERLKRIVDENAKIVEDARRALEKIVKENEEILRRLKKELRELRK

SEQ ID NO: 12851 - protein, 185 aa, Artificial Sequence; identical to SEQ ID NO: 12850
  Synthetic

SEQ ID NO: 12852 - protein, 172 aa, Artificial Sequence
  Synthetic
SRAETVLKEVTDKIKKLADSSDELLRRNKENIDELKKSSEELLRRLTKAIEEIEKGSVDEETLEELIRRVEAELEAHHRELEKNSREDEKRNRDHHAKLEEEMRRVEERLEREGIDDEVVKRVRDLLDTVRRRNEKVNEDVKRMNDKLRRDNEDVIRRVEKLLRELEEKRRT

SEQ ID NO: 12853 - protein, 172 aa, Artificial Sequence; identical to SEQ ID NO: 12852
  Synthetic

SEQ ID NO: 12854 - protein, 172 aa, Artificial Sequence; identical to SEQ ID NO: 12852
  Synthetic

SEQ ID NO: 12855 - protein, 172 aa, Artificial Sequence; identical to SEQ ID NO: 12852
  Synthetic

SEQ ID NO: 12856 - protein, 177 aa, Artificial Sequence
  Synthetic
DEVRELLERNRRLLEEIKKTVKDLIRANEELLKRIEDDAKRLIDRNEELLDELEKGLSDDETIREAKERLKASLEDVKRRVEEVKRLLEKSLEEVETIIREAEKRNRDSLREMERRGSSEELEELRRVVEESDETIKRLLEEAKESVDRSLDRIRKLLEDVRRSVERSAKRIDEKRK

SEQ ID NO: 12857 - protein, 177 aa, Artificial Sequence; identical to SEQ ID NO: 12856
  Synthetic

SEQ ID NO: 12858 - protein, 180 aa, Artificial Sequence
  Synthetic
STEEVLDEIRKLHKTLTEDIKRVLREIEELHRRTIEENKEVLDKIAEDYKRVIDDVRTKDTPNVEKLLKDLEKSAKENIEHNERTLREDDRVLKEIRRRATELLKANEEMLRRIEEVARKGGVDAEELLRESKEAIKEVKRVLEELRKESKRVVDETRKLSEENLEHSERVLRKVEEDLR

SEQ ID NO: 12859 - protein, 180 aa, Artificial Sequence; identical to SEQ ID NO: 12858
  Synthetic

SEQ ID NO: 12860 - protein, 188 aa, Artificial Sequence
  Synthetic
SEIEKILKEIEDLARRDEEVSKKIVEDIRRLAKEVEDTSRDIVRKIEELAKRVLDRLRKDGSKEELEKEVREVVKTLEELVKDNHRLIRRAVEEMKRLVEENHRHSREVVKELEDLVRELRKGSGSEDSERLVREVEDLVRRLVRRSEKSNEEVKRTVEELVRRMEESNDRVRDLVRRLVEELKRAVD

SEQ ID NO: 12861 - protein, 188 aa, Artificial Sequence; identical to SEQ ID NO: 12860
  Synthetic

SEQ ID NO: 12862 - protein, 178 aa, Artificial Sequence
  Synthetic
SEAEKAKETIDRLADRVRKLLEEIKRSLDDSRRKSKETVEENEKTLDRMRKEVDAAKRGSVSEEELERLIRKLKKTLDELRRRHEKLVEDLRRNLERIKRRLEELTREMRETLERLAREGLDEEVLRTLEEIIRRLTKELEDVLREYERELRRLEEENKRVIDKTEEEIRRLADRLRR

SEQ ID NO: 12863 - protein, 178 aa, Artificial Sequence; identical to SEQ ID NO: 12862
  Synthetic

SEQ ID NO: 12864 - protein, 178 aa, Artificial Sequence; identical to SEQ ID NO: 12862
  Synthetic

SEQ ID NO: 12865 - protein, 178 aa, Artificial Sequence; identical to SEQ ID NO: 12862
  Synthetic

SEQ ID NO: 12866 - protein, 179 aa, Artificial Sequence
  Synthetic
SEVEELIKRLAKVLKELVDKVRKVIEDTKELLERLKRRSEDHIRKLREVLKEAKDQPIDDEELKEILDRLRKTLEELEEELKKALEDDREEAKRLVDDARRVLKELEEEVREIRERRGESEELDRRIEKVLKEIEEKIREVIKEWERVHREVEELLKRLIDENRKVLDEIRKLLEEKSK

SEQ ID NO: 12867 - protein, 179 aa, Artificial Sequence; identical to SEQ ID NO: 12866
  Synthetic

SEQ ID NO: 12868 - protein, 179 aa, Artificial Sequence; identical to SEQ ID NO: 12866
  Synthetic

SEQ ID NO: 12869 - protein, 179 aa, Artificial Sequence; identical to SEQ ID NO: 12866
  Synthetic

SEQ ID NO: 12870 - protein, 182 aa, Artificial Sequence
  Synthetic
SELEEIEKKVRELTKRHRELVERVRKTVKELIETNRRLLETLTERIKRVLEEVRDLERRGEPKEDLKARLEDIIRRLAEDIERVKRETDKLLEELARIIEEVEKEMRETNKELDKEIKDGGLDDKALEEAKRVLAENNEVIKDIKRALDELLKELEKSVRESEERLRRLLEEVKRVIEEVAT

SEQ ID NO: 12871 - protein, 182 aa, Artificial Sequence; identical to SEQ ID NO: 12870
  Synthetic

SEQ ID NO: 12872 - protein, 186 aa, Artificial Sequence
  Synthetic
SEAERLEARARELLRANEELMDDLRAKAEELLKRNDRLVKEIEKKVREVLAAIEELKRRGEPKEEVARKIEEILRRLEETLRRIKEESDRLDEELKRELERVKRESEELDRELRKLIEDVERRGSGSKRLEELLRRLNEEHKRISDELRKLLDEALEAHRELSRRLEEELERLLREIERLVEEVTR

SEQ ID NO: 12873 - protein, 186 aa, Artificial Sequence; identical to SEQ ID NO: 12872
  Synthetic

SEQ ID NO: 12874 - protein, 176 aa, Artificial Sequence
  Synthetic
SVDEVLKEIEDALRRLKEEVERVLKENEDELRRLEEEVRRVLKEDEELLESLKRGVGESDEVDRVVDEIAKLSAEILEKVKKVVKEIRDSLETVKRRVDDVVRRLKELLDEIKRGSDEKAIRDVAKEIRDRLKELEEEIEEVTRRNLKLLADVEEEIRRVHEKTRRLLETVLRRAT

SEQ ID NO: 12875 - protein, 176 aa, Artificial Sequence; identical to SEQ ID NO: 12874
  Synthetic

SEQ ID NO: 12876 - protein, 184 aa, Artificial Sequence
  Synthetic
DDLERAREEVADLIRKHEEKTRRILEESRRLNERHRELSARILDEIRKLAERIEELIKRERGKDELRRKVEDLEARVEDLIRRLEEHLRRVHDKDRRLIEDLRRHLKRVVEELKRLIDELRRGVPKEELDRIEEELKRLIDTLREKNREVEKRARDSNRDLKRTNDEIAKEVRELIKKLREDLK

SEQ ID NO: 12877 - protein, 184 aa, Artificial Sequence; identical to SEQ ID NO: 12876
  Synthetic

SEQ ID NO: 12878 - protein, 174 aa, Artificial Sequence
  Synthetic
KEVEDAVKELEDLLRANEDKTRSIVEDMRASNKDLEDHSRASEEEVRKLLDDLRRAGVPRDSLKRLAEDVERVTRESRELLERVHRADRELIERLKESNERLRRAIEEIRKAIKGGSDIKTLLDRVRKLAEEDAERLDRLRRESEELNERVRRVDKKLLEEIRRKAKKVEDDTR

SEQ ID NO: 12879 - protein, 174 aa, Artificial Sequence; identical to SEQ ID NO: 12878
  Synthetic

SEQ ID NO: 12880 - protein, 174 aa, Artificial Sequence; identical to SEQ ID NO: 12878
  Synthetic

SEQ ID NO: 12881 - protein, 174 aa, Artificial Sequence; identical to SEQ ID NO: 12878
  Synthetic

SEQ ID NO: 12882 - protein, 174 aa, Artificial Sequence
  Synthetic
DEEEDLERAIKKLLDENRELLKRIAEELRRLLEELRRLTEESADRLRRLLKELKDRGVPEEDLADVAEKVKKVLKESEDSNADVARKLEKLLRDLERSTERLEREARKVRKLLRGGKDAETLLRELEKLSRDNKELLKKIEKEIRDLIKEDKERNIELSERLRKLVEELKKKAT

SEQ ID NO: 12883 - protein, 174 aa, Artificial Sequence; identical to SEQ ID NO: 12882
  Synthetic

SEQ ID NO: 12884 - protein, 174 aa, Artificial Sequence; identical to SEQ ID NO: 12882
  Synthetic

SEQ ID NO: 12885 - protein, 174 aa, Artificial Sequence; identical to SEQ ID NO: 12882
  Synthetic

SEQ ID NO: 12886 - protein, 178 aa, Artificial Sequence
  Synthetic
DDAERILREMERLLEENKEISDEIAKELKRLLDENRKLSEDVVKALEDLLRDLERRSGVSEEVLKRVREVLERIKRELDRSDDELRKVAERILRDAERSNDELRKVIEEIEEELRGSRDKDTLRELARSIRKLSAENKERLKELLRELKKLSDENKERIKKLLSDAEKIIEDVARRAK

SEQ ID NO: 12887 - protein, 178 aa, Artificial Sequence; identical to SEQ ID NO: 12886
  Synthetic

SEQ ID NO: 12888 - protein, 177 aa, Artificial Sequence
  Synthetic
SSEERLRAVIEDLKRLAEESRKRHKELIDELAKAVERIERRHKKLLDEIKAVVDDIRRGVSEELLKRIEEVLDEIRKELEENIKRIRKVLDELRRTSEENIARIEKVLRELEDLVRKGGSDADTIIEEVKRVLEELARSTEEVEKRVRDAIEELERSSEELARRIKEVLKRLEEETR

SEQ ID NO: 12889 - protein, 177 aa, Artificial Sequence; identical to SEQ ID NO: 12888
  Synthetic

SEQ ID NO: 12890 - protein, 178 aa, Artificial Sequence
  Synthetic
DEARELVKELEDLIREITKTVRRLLEESEELIKRIDDAVDDLRRADEDLNREIKEEIEKGKSKESLEALIERLKESLERVKRTIEKLIRDLERLNEKLRRDVESLVAELEKILSKIKRGGLDERILRELEERVKELEKEAREILKRSEDETDKLREKAERILEDLERANRRTMDEARR

SEQ ID NO: 12891 - protein, 178 aa, Artificial Sequence; identical to SEQ ID NO: 12890
  Synthetic

SEQ ID NO: 12892 - protein, 178 aa, Artificial Sequence; identical to SEQ ID NO: 12890
  Synthetic

SEQ ID NO: 12893 - protein, 178 aa, Artificial Sequence; identical to SEQ ID NO: 12890
  Synthetic

SEQ ID NO: 12894 - protein, 184 aa, Artificial Sequence
  Synthetic
DEIRKVVKEITDLLKASNDKNRKVVEEIRDLLRKSKKLADELVERLRALVEDLRRRIDKSGDKETAEDIVRRIIEELKRILKEIEDLARRINREIERLVEEVERDNRDVNRAIEELLKDIARRGGSEDLKRVEERAREVSRRNEESMRRVKEDADRVSEANKEVLDRVREEVKRLIEEVRETLR

SEQ ID NO: 12895 - protein, 184 aa, Artificial Sequence; identical to SEQ ID NO: 12894
  Synthetic

SEQ ID NO: 12896 - protein, 184 aa, Artificial Sequence; identical to SEQ ID NO: 12894
  Synthetic

SEQ ID NO: 12897 - protein, 184 aa, Artificial Sequence; identical to SEQ ID NO: 12894
  Synthetic

SEQ ID NO: 12898 - protein, 176 aa, Artificial Sequence
  Synthetic
STAETVEKKVEEVIRENEKSMRESEEKVDRSTKRIEDVLRRLEETIRKTSDDIAKGVKGERVKEVLEENRRLLEEAKKLVDEVLETNKKLLEDDKRLNEEVSKTLKKLLEEIKSVDTREDATRVIEEAKRILDEARKLNEETIRRSEELVRRIERVIEEIIKRSEKLLEDVARESK

SEQ ID NO: 12899 - protein, 176 aa, Artificial Sequence; identical to SEQ ID NO: 12898
  Synthetic

SEQ ID NO: 12900 - protein, 176 aa, Artificial Sequence; identical to SEQ ID NO: 12898
  Synthetic

SEQ ID NO: 12901 - protein, 176 aa, Artificial Sequence; identical to SEQ ID NO: 12898
  Synthetic

SEQ ID NO: 12902 - protein, 176 aa, Artificial Sequence
  Synthetic
STAETVAEEVERVLKHSDDLIKEVEDVNRRVEEEIKRVIRELEEENERLVAEVRKGVKGEILAEIEKRLADNSEKVREVAERAKKLLEENTARVKDILRESRKLVKDLLDEVRGTGSEEAAREIIKRLREVNKRTKEKLDELIKHSEEVLERVKRLIDELRKHSEEVLEDLRRRAK

SEQ ID NO: 12903 - protein, 176 aa, Artificial Sequence; identical to SEQ ID NO: 12902
  Synthetic

SEQ ID NO: 12904 - protein, 176 aa, Artificial Sequence; identical to SEQ ID NO: 12902
  Synthetic

SEQ ID NO: 12905 - protein, 176 aa, Artificial Sequence; identical to SEQ ID NO: 12902
  Synthetic

SEQ ID NO: 12906 - protein, 182 aa, Artificial Sequence
  Synthetic
DEVREVAERLRRLVDESRKRNEEVIKESEALVDRVRKTNEEVMKRLRELIDKLEKDIRRSGDKETVEKIIREVLSAIDELLKRVERTNAEISKENARLLDEVRKTNEEISRRLAKLLEDIRRGSGDAETIERVVRELLEENKEVLRKTEEAVKRSTETNKRLLEASKEVADRLRERIKEAAK

SEQ ID NO: 12907 - protein, 182 aa, Artificial Sequence; identical to SEQ ID NO: 12906
  Synthetic

SEQ ID NO: 12908 - protein, 186 aa, Artificial Sequence
  Synthetic
SRVEEIIEDLRRLLEEIRKENEDSIRRSKELLDRVKEINDTIIAELERLLKDIEKEVREKGSESEEVKKALRAVLEELEKLLRRVAEINEEVLRRNSKLVEEDERRNREVLKELARLVEELIREIGDEDKARKVAEVAEKVLRDIDKLDRESKEAFRATNEEIAKLDEDTARVAERVKKAIEDLAK

SEQ ID NO: 12909 - protein, 186 aa, Artificial Sequence; identical to SEQ ID NO: 12908
  Synthetic

SEQ ID NO: 12910 - protein, 186 aa, Artificial Sequence; identical to SEQ ID NO: 12908
  Synthetic

SEQ ID NO: 12911 - protein, 186 aa, Artificial Sequence; identical to SEQ ID NO: 12908
  Synthetic

SEQ ID NO: 12912 - protein, 186 aa, Artificial Sequence
  Synthetic
SEVDEIIKELERLLAEIARENERIIRESRKLADEVRKRNEDAIRKLEELVARLADAVRRKGSESEEVKKLIEDVLREIERLLKRIEEENREVVKRNSELVERVRAINEEILRRVAELVEKIARDIGDKDEVTKVKKVADDVLAEIKKLDDETRRVIEDTNKKIADLDKATRDVVRKVLEEVKKLEK

SEQ ID NO: 12913 - protein, 186 aa, Artificial Sequence; identical to SEQ ID NO: 12912
  Synthetic

SEQ ID NO: 12914 - protein, 180 aa, Artificial Sequence
  Synthetic
REVEEMIKELEELLKDLKEKNERASKRNRELVRRLEEENKRVIEELKKLVKELEDLVRSGEDEEVLREVLKRLEEVLERVRALNERVLEAIEKSLEEVKASNEAVKRRLKELLEEAERGVDSEKLKELRDVIAEVAKRIDELDEYTRESIRRAKKEIERLNRETKKVIEEVVKRIEEERK

SEQ ID NO: 12915 - protein, 180 aa, Artificial Sequence; identical to SEQ ID NO: 12914
  Synthetic

SEQ ID NO: 12916 - protein, 180 aa, Artificial Sequence; identical to SEQ ID NO: 12914
  Synthetic

SEQ ID NO: 12917 - protein, 180 aa, Artificial Sequence; identical to SEQ ID NO: 12914
  Synthetic

SEQ ID NO: 12918 - protein, 181 aa, Artificial Sequence
  Synthetic
DAVEEAEKLIRKVIADSEKLLRDLADLNAKSIRRSEKLVEDDRRANEDVIRKLEELRRNGGSEEELRALLKEVEDTNRASHETNKRLLDEDRALNKEVHDRNEKLLRDIKRLVEEVAKGIDSEELLRRIKKLLDEIKKAIEDSSREIKRLLEESERVMKRSSEDIKRTLDDTRRVVEEVRR

SEQ ID NO: 12919 - protein, 181 aa, Artificial Sequence; identical to SEQ ID NO: 12918
  Synthetic

SEQ ID NO: 12920 - protein, 181 aa, Artificial Sequence; identical to SEQ ID NO: 12918
  Synthetic

SEQ ID NO: 12921 - protein, 181 aa, Artificial Sequence; identical to SEQ ID NO: 12918
  Synthetic

SEQ ID NO: 12922 - protein, 177 aa, Artificial Sequence
  Synthetic
SSDEVLKEIEEIIRRLEAEVRRVNAEVNASTEDLAREVEEVLRATNELIEELERRVTGTEELKRVIDELRDRDRKVRRRVERVIEESAKRDDESRKRLTRAVEKLRADLKKLADDGVPEEALSKAIKDVRDIVKKVKDELKEWRDRNKELVDRLSEELKEWLKDVERVLKELTDKDR

SEQ ID NO: 12923 - protein, 177 aa, Artificial Sequence; identical to SEQ ID NO: 12922
  Synthetic

SEQ ID NO: 12924 - protein, 175 aa, Artificial Sequence
  Synthetic
SEADDVLKKLAETVKRIIERLKKLTDDSRRLVEEVHRRNDKLSKESAEAVRKAEERGIDEKDVRKLLEDLKKKSEEVAERNKRILDTLREISKRAEDEVRKVLKELEKTLKELEDRRPDSEELSAEVKKLLDEVRKALARHKDENDKLLKEIEDSLRRHKEENDRLLEKLKESTR

SEQ ID NO: 12925 - protein, 175 aa, Artificial Sequence; identical to SEQ ID NO: 12924
  Synthetic

SEQ ID NO: 12926 - protein, 175 aa, Artificial Sequence; identical to SEQ ID NO: 12924
  Synthetic

SEQ ID NO: 12927 - protein, 175 aa, Artificial Sequence; identical to SEQ ID NO: 12924
  Synthetic

SEQ ID NO: 12928 - protein, 185 aa, Artificial Sequence
  Synthetic
SEIDEVLTRLRKISKDLNETSDRVNERARKIIDDIKKESKRVNDEAREIVERLKREIDKTRDRDVLRRILKEIEDVARRVKEINEELLARVEKVVREVEEINRELVKRSREAVEAVKRLLDRGVSDEDKVERVVREVEKLHEEDRKRLEESTRSVRKLLEELKRELEKSTRSVKALVDELRERVR

SEQ ID NO: 12929 - protein, 185 aa, Artificial Sequence; identical to SEQ ID NO: 12928
  Synthetic

SEQ ID NO: 12930 - protein, 185 aa, Artificial Sequence; identical to SEQ ID NO: 12928
  Synthetic

SEQ ID NO: 12931 - protein, 185 aa, Artificial Sequence; identical to SEQ ID NO: 12928
  Synthetic

SEQ ID NO: 12932 - protein, 175 aa, Artificial Sequence
  Synthetic
SEAEEIRRRLEEISRRSVEHLRKVLEEIKRISERSKRHLDRVLEENARRLEELAELLKRGGDKEELLADLKAVHDESRKVIEKNAEENDRALKAAKEVIDENRERNKRVLDEVRKGGLPEEVLRELEELLKESEERIKRIEEEIKKIIDKSREDIKRVLEEIERLNAKAADDLRK

SEQ ID NO: 12933 - protein, 175 aa, Artificial Sequence; identical to SEQ ID NO: 12932
  Synthetic

SEQ ID NO: 12934 - protein, 181 aa, Artificial Sequence
  Synthetic
SEVDDVLRRLEELIKTLEDINAKSLEDIKKLIDDLAKILEDALRKHEKLIRELREAKKGIDSREAEEIAKRVLEELKRTSDDLRKKVERVDEDLRRLLRENHERNKKILRDLERLLRDAARRGVPKEALDRMREEIRRLEEESRKSDETIERLIRELRRRVEEVLKTSTDLIRELEEEVKK

SEQ ID NO: 12935 - protein, 181 aa, Artificial Sequence; identical to SEQ ID NO: 12934
  Synthetic

SEQ ID NO: 12936 - protein, 181 aa, Artificial Sequence; identical to SEQ ID NO: 12934
  Synthetic

SEQ ID NO: 12937 - protein, 181 aa, Artificial Sequence; identical to SEQ ID NO: 12934
  Synthetic

SEQ ID NO: 12938 - protein, 178 aa, Artificial Sequence
  Synthetic
SDAEELLKRVADLLKASLESLEKILRDSKELMDRWRKKLEDLLRESEELVDRAEKILRRGGSDKEVLDKIAEEVRRTNDDSRRLDEELHRLSRDTLRKLEENLRRTEKEVREMDKRAAERGVDERVREELKKLLTRVEEEHRKVLETDKKILKEAHKESKEVNDRDRELLERLEESVR

SEQ ID NO: 12939 - protein, 178 aa, Artificial Sequence; identical to SEQ ID NO: 12938
  Synthetic

SEQ ID NO: 12940 - protein, 178 aa, Artificial Sequence
  Synthetic
DAAERAKEKLDKILEDLRDVVRASKENLDRLHAENAETLERSKANLDRLLEKVKKDGVPEELLKELERIIRDLKRKHAKLLEDHRKIIEELKREHDRLLKEAEEIVRRIKDELEKGSDDERDIERILRELEAVLKKLTDESERLNREVERVSRDTKKKSKELNEELKAVLDEVKRKAD

SEQ ID NO: 12941 - protein, 178 aa, Artificial Sequence; identical to SEQ ID NO: 12940
  Synthetic

SEQ ID NO: 12942 - protein, 181 aa, Artificial Sequence
  Synthetic
SEIETVRREIEKILDDLRRTVKRIEDEVRKIHEDLRRSLEDSKRNIEEILKDLERAARRDGLDKKVEDDMRKLVEDLKRKHDKLRADNEAVTKELKDRLKKLEDDLARAIEELRRRLDKGLDKEDIDKLLKELRDLVEKIKKDLKELLERYEEIVRRIKELLKDLNREAEEVVRRLKEELR

SEQ ID NO: 12943 - protein, 181 aa, Artificial Sequence; identical to SEQ ID NO: 12942
  Synthetic

SEQ ID NO: 12944 - protein, 174 aa, Artificial Sequence
  Synthetic
KELEDVIEEVKKLLKTVNEESRRVAEEVRKLIREVSEELTEVIRRVERLVEEVAKGVDSEEALDAVRKRIEELVRRVEEVNAASKRRIEELEDELRKVDEESRETIERLIDLLRRGLDAETVLRSAEDIVAKNRKLAEEVLRRVKKIVEENRKIASEVLDDVRKLVEDVLARAS

SEQ ID NO: 12945 - protein, 174 aa, Artificial Sequence; identical to SEQ ID NO: 12944
  Synthetic

SEQ ID NO: 12946 - protein, 183 aa, Artificial Sequence
  Synthetic
SKLEEVEKAVRKVIEDSRRVNEEVNRRSEEVVRELEKVHREVNDASRRVVEKARRVLKGSGDERLAAEVERIIEEIRELNERDRKRVEEIRKEIEDLNRDLNRRSKESEDRLRKLLEDATRGGVTKEADEVVERAERISEENKRRVEDVARKSKELVEDVRRHSEEVVRRVEELVKEVEERVR

SEQ ID NO: 12947 - protein, 183 aa, Artificial Sequence; identical to SEQ ID NO: 12946
  Synthetic

SEQ ID NO: 12948 - protein, 183 aa, Artificial Sequence; identical to SEQ ID NO: 12946
  Synthetic

SEQ ID NO: 12949 - protein, 183 aa, Artificial Sequence; identical to SEQ ID NO: 12946
  Synthetic

SEQ ID NO: 12950 - protein, 173 aa, Artificial Sequence
  Synthetic
SAEEVKEELKRIATKLKEEIKENIRRLEESVEKIAKELAENIKRLEDILRDVKRGLRDERIVKTVEDIARRVVEDNERIMEEDKDVVRRLVERNEEIVRRVDETVKKIVELIDRGEPGEELVERLRRVVEEVRERLKDSSRELRKINEDSRKAVEDSSAEVAKVVEELERRDT

SEQ ID NO: 12951 - protein, 173 aa, Artificial Sequence; identical to SEQ ID NO: 12950
  Synthetic

SEQ ID NO: 12952 - protein, 175 aa, Artificial Sequence
  Synthetic
SEIERVKKRLEELLAEVEESTRRLEERLKRLLEEAKRSSEEVEKELRRLLEAVRRGLSRDEKLVSELEARVKELLEDSRASLEELKKRVRKLAEDSARLLEEVKREVEKLKAKLDRGGDADDVLARVEELAKRAHDENERLIREVEELVRAHNKRNKELVDEVKRLVEKVIEEER

SEQ ID NO: 12953 - protein, 175 aa, Artificial Sequence; identical to SEQ ID NO: 12952
  Synthetic

SEQ ID NO: 12954 - protein, 175 aa, Artificial Sequence; identical to SEQ ID NO: 12952
  Synthetic

SEQ ID NO: 12955 - protein, 175 aa, Artificial Sequence; identical to SEQ ID NO: 12952
  Synthetic

SEQ ID NO: 12956 - protein, 183 aa, Artificial Sequence
  Synthetic
SDVDRVLEEIRKLLEDLKRHSEKVSEENEDLLRANTELNKRVSEDNERLLEELKRLRERGGISEEDLKRALDRVRKTVETVKEENKRSLEDVRRTVETNKRKLERVVEEIKKLIEDAKRRGSGDEEAKKKLDEVLERAKRTIDRLLETSDRSLEKVEADLRRLNEELDRSLERAERTIRELAK

SEQ ID NO: 12957 - protein, 183 aa, Artificial Sequence; identical to SEQ ID NO: 12956
  Synthetic

SEQ ID NO: 12958 - protein, 183 aa, Artificial Sequence; identical to SEQ ID NO: 12956
  Synthetic

SEQ ID NO: 12959 - protein, 183 aa, Artificial Sequence; identical to SEQ ID NO: 12956
  Synthetic

SEQ ID NO: 12960 - protein, 173 aa, Artificial Sequence
  Synthetic
STEDVLRKIKEDVKRVIDDNRRILDEVRRTSKRVLDDLRANLKHIAEEVERVLRGSDSEEVVRELAKILDEIREEHRRLIRTNEKVLEDIERDHRRISEELKRILDEVDELLRGGKPSKELLEKAKAVVDEIKRLAEESLKRLEDLSRDHKRRAKELNDEIAKVVDELAKRAT

SEQ ID NO: 12961 - protein, 173 aa, Artificial Sequence; identical to SEQ ID NO: 12960
  Synthetic

SEQ ID NO: 12962 - protein, 180 aa, Artificial Sequence
  Synthetic
SAEELLREVAELVKRVDEDLRRLLEEVRASNEEVIRRLEEILKRIEEENRKVVEELRRGGVSEDLVRESKRLVDESRRVIEKLVKESADSVERTRETVDRLREELKRLVEEIAKMVKGGSSEETVKRLLDELRELLERLKRTIEELLKRNRDLLADAEEKARRLLEENRKLLKAARDTAT

SEQ ID NO: 12963 - protein, 180 aa, Artificial Sequence; identical to SEQ ID NO: 12962
  Synthetic

SEQ ID NO: 12964 - protein, 177 aa, Artificial Sequence
  Synthetic
SEDEDLDRVAEKLAREHKKSVEEIKRVLKSADEESKKLVRDTERVIEEIKREVEEARRGNIDEELVERLKKKIEDILRTLEERHKKLIKELREILKRLSDESRRLAEETEKVLEDLERKGVDEEVLKKLAEIVRRVKEENRKVNEEVEKRLRELEEENKKVIEDLKSTVEELVERLR

SEQ ID NO: 12965 - protein, 177 aa, Artificial Sequence; identical to SEQ ID NO: 12964
  Synthetic

SEQ ID NO: 12966 - protein, 177 aa, Artificial Sequence; identical to SEQ ID NO: 12964
  Synthetic

SEQ ID NO: 12967 - protein, 177 aa, Artificial Sequence; identical to SEQ ID NO: 12964
  Synthetic

SEQ ID NO: 12968 - protein, 180 aa, Artificial Sequence
  Synthetic
DEVEDVLRKIEKILDDHRKRIEKNSRDMARIIDEHRRKVEENSREMKKLVDDLKKAVDRGEGDEETAEDVKAKLEKSNRELEKHSEEVKRALDESNEDLRRHSEEVKERIERLVKKLREDGVEREEELKEVADRVKEKLDRLNRENEKSSEELKRELDKINDENRETSERLKREIDETTR

SEQ ID NO: 12969 - protein, 180 aa, Artificial Sequence; identical to SEQ ID NO: 12968
  Synthetic

SEQ ID NO: 12970 - protein, 177 aa, Artificial Sequence
  Synthetic
SKEDRLREELKKLLARLAEEIERLKRALEESNKDLKRTIDASEKHLRDVNEDVKRGGVSEELLRELERSTAENKERAKELLKRHEDLVRKVEKELADLLRRLEEIVARVDEALKRGISEEELDKLLKEARDLIREIEKRLEELLKRVEKLTEDAKRDLERSNREHKELADRIKETAR

SEQ ID NO: 12971 - protein, 177 aa, Artificial Sequence; identical to SEQ ID NO: 12970
  Synthetic

SEQ ID NO: 12972 - protein, 177 aa, Artificial Sequence; identical to SEQ ID NO: 12970
  Synthetic

SEQ ID NO: 12973 - protein, 177 aa, Artificial Sequence; identical to SEQ ID NO: 12970
  Synthetic

SEQ ID NO: 12974 - protein, 185 aa, Artificial Sequence
  Synthetic
SSVEELLERLRRISEENKRRIEKLLREVEKVLRELKDRHRKLLKRVEEIIRKVKEEIKSGLPEEAVKRVLERVRERVKEVLEEADRLNDEMRRIVTEVEKELDKSDKEVEDAVRDILKKIEEGVRDRETAERARETLKRLLDENRDRSKKVKEEIRRILEDLTRTTERVKREIAKLLKELEDTAR

SEQ ID NO: 12975 - protein, 185 aa, Artificial Sequence; identical to SEQ ID NO: 12974
  Synthetic

SEQ ID NO: 12976 - protein, 185 aa, Artificial Sequence; identical to SEQ ID NO: 12974
  Synthetic

SEQ ID NO: 12977 - protein, 185 aa, Artificial Sequence; identical to SEQ ID NO: 12974
  Synthetic

SEQ ID NO: 12978 - protein, 180 aa, Artificial Sequence
  Synthetic
SELEEVLRRIEALVRKAHKENEDVLREIERLVRTAHRLNKKVDDDSAKIAEDLKRGGREDKDKVEEALRRLRELYRRLEEENRRILREIEELVKELEKRNREILKELEDLVADAERKGSDGSEAVRRLKEILERLKEEVRRSLEELRKEVERLKKEVEDSLRELKKSLEEWVKSLEEATR

SEQ ID NO: 12979 - protein, 180 aa, Artificial Sequence; identical to SEQ ID NO: 12978
  Synthetic

SEQ ID NO: 12980 - protein, 180 aa, Artificial Sequence; identical to SEQ ID NO: 12978
  Synthetic

SEQ ID NO: 12981 - protein, 180 aa, Artificial Sequence; identical to SEQ ID NO: 12978
  Synthetic

SEQ ID NO: 12982 - protein, 172 aa, Artificial Sequence
  Synthetic
SKEEELEKLLREHHEKIKRLKEESKRINDRIRRTVEELIKESEKINRDINDTVRKGDRDEEVIRRLLEDVRRKHEELRERLKRELDKVRERHKELLDRARRATEAVKERLDRGGLSEDSVERIARELERNLDDLARVLKESEDDLAEILRRLKEVLEESERDLERVEREVRK

SEQ ID NO: 12983 - protein, 172 aa, Artificial Sequence; identical to SEQ ID NO: 12982
  Synthetic

SEQ ID NO: 12984 - protein, 252 aa, Artificial Sequence
  Synthetic
SEAEEAAERAKRAAKEAVERAKRAVERNEEAARRAAEKAREATERAERAARRAADKARKATDRRALRDAAKELEDAARENADALRKAIEDLARATDEAIKAAREAAKRLKDAAKEALDAARRTARDEDAERILRELKEAIERAARRLDRLLREWEKAAERIKRDAERLLEEWERAAEKIRKELEDIDRKAKDIKDAADKLAEAAKRAVDISKKAADDLKRLAKEDNEIAREAARRLAEAAKEAVKLVDDVTR

SEQ ID NO: 12985 - protein, 252 aa, Artificial Sequence; identical to SEQ ID NO: 12984
  Synthetic

SEQ ID NO: 12986 - protein, 233 aa, Artificial Sequence
  Synthetic
SEKEKAAEDLRRAIEEAKKRSEEAAKELEDALRKAEKEARDSAETLKEAAKRAADAGAPEEALRALEEAIKKAIKASKDALDALREAIKESIDSNREALKALKEAVERAEEGGDREIARRAAERAREAAKRAAEKNKRAARKAEEAAKRAVDEHRKAAKEAREAAERAVRKAEDKDAATEAKKAADTIAKLIEDNAKRALEAAREIAKLIEKSAKEALEAAERIARLIEEAAN

SEQ ID NO: 12987 - protein, 233 aa, Artificial Sequence; identical to SEQ ID NO: 12986
  Synthetic

SEQ ID NO: 12988 - protein, 234 aa, Artificial Sequence
  Synthetic
SVEEAARRAAKALKDAAKKLLEANEKAARAWKELAKELIKADEKALKILEEAARKARRDGPDKEIEKELRKAAREYEEIIKDLREKAKKVLEEYRRIVKKLEEDLKRALDKLREDGVKKDALDAARRAAELLAEAAKKAAKAHEEAARLLAKAAEDSARAAKEAAELLRRALEENKRAEEAAKEAIRIAEEALRRSAEAAERAARIAEDAARKSRKAAEDAAKIAKEAADRARK

SEQ ID NO: 12989 - protein, 234 aa, Artificial Sequence; identical to SEQ ID NO: 12988
  Synthetic

SEQ ID NO: 12990 - protein, 239 aa, Artificial Sequence
  Synthetic
SEEDRLRELAERARRLAKRNRELAKEIIDEIRKLIRDAREAAKKSAEKAKRLIDDARRVAGKPTDRKIVETLARRSAKANEENARLIKRLAEEAIRAAKKAADADRKSAKEVIDALKRIAEDLQAREAADAARRAAKIAKEAADEAIKAWEDAARIAERAARKSIEANKRAIKIAREAAERNAIEEAAKANEEAIKASEEAVDEAARALEEAAEASKRANEKADKALEDAVRAAEEATR

SEQ ID NO: 12991 - protein, 239 aa, Artificial Sequence; identical to SEQ ID NO: 12990
  Synthetic

SEQ ID NO: 12992 - protein, 238 aa, Artificial Sequence
  Synthetic
SEKEDVLRRIREAHERNKRLLERVAEEIKRIVEESRKLLEDVRKKAEDAARRAEEALRKEARDDEKAAEELAKILEDLARLLEEAARRNAKLLRDIAELVKRAAEENAKSNEEIARLLKEAGADDTAAKKVKEAADESLKAAEEAAKKIEEAARKSLEAARRAAEKIKRAAEKAREAAREKAKEALLKAAKEALEALEEALRLIAKATEEAARAAKEALDLILEADRKSAKAAEEALR

SEQ ID NO: 12993 - protein, 238 aa, Artificial Sequence; identical to SEQ ID NO: 12992
  Synthetic

SEQ ID NO: 12994 - protein, 238 aa, Artificial Sequence
  Synthetic
SEREEVAKRATDAHEENERLLREVEKRIKEALERNEELLKRVSDKAREAAKKLEDALRRRARDDERAAEELVKALEDLARLIEEAAKRNAESLREIAKLVRRAAEENAKSNKDLAKLLKDAGADDDAARKVKEAAEESLKAAEEAVKKIEDAARKSLKAAKEAAEKIRKAAEEARRAAEERAKEALRRAAKKALDAAEEALELIRKASKEAADAAREALKLILEADKKSLEAAREALR

SEQ ID NO: 12995 - protein, 238 aa, Artificial Sequence; identical to SEQ ID NO: 12994
  Synthetic

SEQ ID NO: 12996 - protein, 244 aa, Artificial Sequence
  Synthetic
SEREEIEEIKKRVDRTLEEYERKVEDIRRKLTELKDESDKKVKDVRRKLKETEDRVREEGSSEVIERIIEDVKKILEDLVRVHRESLDTAVRIAEELVRVARESIKRVKEILRELAEASKTKDEEKLREILERVKEKLKKIIDDNREVLKRVEEKVKEIIKRNKDVNDRVREELKRLAEELERANVEELRELIERLVRIAEEVSEEDERVLRSLEDILRKVVEENERLLERLKRILEELIRRTR

SEQ ID NO: 12997 - protein, 244 aa, Artificial Sequence; identical to SEQ ID NO: 12996
  Synthetic

SEQ ID NO: 12998 - protein, 245 aa, Artificial Sequence
  Synthetic
SEDEELKKELEKLLKELEEKLEKYRDDLRKDKERLKEKLDRYRERLRELMEELKDLLDKRVRAKELLDRIREIIKESADANRELLEEIRKTLEKSKRMNEELLKKIKEIIERIEERLRKRGVPEEVLRTLAEKARRLLEELKKESERIVREAEEILKRIEEELREVHKELEEILRRIKRKLDEETSEDVLRDIVRRVVEVLRKNLKIVEEIIRKIEELLEKNLRLVEEILRRIARLLEEVLEKTR

SEQ ID NO: 12999 - protein, 245 aa, Artificial Sequence; identical to SEQ ID NO: 12998
  Synthetic

SEQ ID NO: 13000 - protein, 242 aa, Artificial Sequence
  Synthetic
SDAEVIEELVRLHRKLLEDILKLLKELVDIHRETLRRIEEIVERIVRLIEALLDKIRKEGKVDEAADEVDRRLKRLAEEIERLVRETERIIREVLKELERTLRETEKRIEDVKKELEERGTDEKLRRLLEMLRKLHEEVAEVVRRVVKLLLDNHKEVIDRVREVLEKLRTVLKELVDVASDSRKEALERLLERLKEIVDRIKEELDRLLKRSEDSIREIEERVKRLLEESKRVVDEIRERLK

SEQ ID NO: 13001 - protein, 242 aa, Artificial Sequence; identical to SEQ ID NO: 13000
  Synthetic

SEQ ID NO: 13002 - protein, 236 aa, Artificial Sequence
  Synthetic
SKEKKILDRLRELLKESRDLNRRVKETLKKLLEDSKRLLDEIRKRLKELLDELEKENKVPEELIRTVREALERLLRRLERHTDELRKALEDLLRRLEEHNDELEDALREILDVKRRRDEDERELRRKIEELKRRSDKLRRELKEEIKRLRDRSRKVKEEIERELKKLKEEIDRVLRETRNDEAVKRLKEVLDEVAELVKTLLEVNRKILEDVDKLIEEVLKLNDDILREVVKLAED

SEQ ID NO: 13003 - protein, 236 aa, Artificial Sequence; identical to SEQ ID NO: 13002
  Synthetic

SEQ ID NO: 13004 - protein, 243 aa, Artificial Sequence
  Synthetic
SEKEKLLEDIADIARKILKLLKEHLDKLRKLLEEIRRLLEEHSRVLRELIERILDALRRKKKLPEEELKRVAERLKELLDRSERRLREITERLKRLLEESERSLEEIKRRIEKLLDDLRKLSKRVDEDELLERLLEVLKRVVDLVREHNELNERILEEVLKLVEELLRFNEEVLKEIADLVRRVVGQDKDLERELKRVKEISRKLEEELKELKERVKRDSEKMNEDLDRLLEDAERRIRKTRE

SEQ ID NO: 13005 - protein, 243 aa, Artificial Sequence; identical to SEQ ID NO: 13004
  Synthetic

SEQ ID NO: 13006 - protein, 237 aa, Artificial Sequence
  Synthetic
SEEDKVLEELKRLLEELLRKHEEVLKEIKELLDKIIKKHEESLRRIKKLAEEIKERAKKPTSDEVLEEIERRLRREEEENEKILRELRREIEEARRRSEEILRRLRDKLRRLEERVRDDELLRRAAEIVDRVLKVHDKVIDDLKKILETILKIHKEVVERLSDIIRELLELIKEGRDGKTLTEELKRIEDKLEELIRRSKDELDKIVREAEKIIEESKRRLEKLLRELERIIEDAKR

SEQ ID NO: 13007 - protein, 237 aa, Artificial Sequence; identical to SEQ ID NO: 13006
  Synthetic

SEQ ID NO: 13008 - protein, 243 aa, Artificial Sequence
  Synthetic
SELEELVKRIEKTLRDLRRKNEELRKEVEEVEREDRERLERAAEDLERVEKKVEDEVRRRRDKSVVDKIIKDLRELLKKLLDIHADLSRKNLELLERLLRISKESVRELERLLRELLEEIRKAGRISEEELKRLKEEIETLSKRIEDIHRRLETELERLRKENREILERLKEELRRLDEEESRRRPIEKTIEDARRLLEKILKLHRENSEESRRLIEDINRVNRELIDEVAELAKKILRRVEE

SEQ ID NO: 13009 - protein, 243 aa, Artificial Sequence; identical to SEQ ID NO: 13008
  Synthetic

SEQ ID NO: 13010 - protein, 239 aa, Artificial Sequence
  Synthetic
RDEELLERVERLLRELLDTNRRKLEEVEKELRRLLETNKKTLDDVRRLLKELLDVLETREVKDEKRLRDIRRRLEEVVRRLDKLHRDIAEDLKRVKERLDRLHERIKRRLEEVVKELRDLKDRGVDERKVLERAAEVLRELLELLRESLEEIERIIRRLLELHKRSTEEAARALEELLRALEESDDLRELKKRIEDLLKEDKERLEKIARDIERDLERYRRDLKRLEDELREDIERARR

SEQ ID NO: 13011 - protein, 239 aa, Artificial Sequence; identical to SEQ ID NO: 13010
  Synthetic

SEQ ID NO: 13012 - protein, 244 aa, Artificial Sequence
  Synthetic
REEEVLRRLREIIKRLLDKNRKVNEDLVRLIKRVLDKNREVLKRLRDLIRELLEVVRNKRDDKDVEETVRRLERELEKLERTSEELVKKVKKELKDLLKDSRDVLEEVRKTLDTIVKETQEDEIVKKAKDIAKKLSDAHKKVLDDVRRILEKLVKLHRETLKKIRELLEELVRVVKAVRREKRPDEDLERALKKVKDELERIVRENEDADRKIKEEVDRLSEENEKVNREIKKELDDVVEETKK

SEQ ID NO: 13013 - protein, 244 aa, Artificial Sequence; identical to SEQ ID NO: 13012
  Synthetic

SEQ ID NO: 13014 - protein, 238 aa, Artificial Sequence
  Synthetic
EEDERLTKRVEEIKRENRELLRRLEEEVKELERKSEKIVRDLKEKVDRAKEKLDSNKESTELLVEELEKLIREILKLSEDHNRTLEEVVRKIEDVLRRNLERLKELVDEILKALKERKKRDVEELKRKVEKVARDYERLLRKLREVVKRILDESKRLDEELEERLKEVLKKLEELIKEGRPDKDVLTELKRILDELLKLVEKLIRRNLRLLEELLRLVREILRTSNEILEEILKDARR

SEQ ID NO: 13015 - protein, 238 aa, Artificial Sequence; identical to SEQ ID NO: 13014
  Synthetic

SEQ ID NO: 13016 - protein, 245 aa, Artificial Sequence
  Synthetic
SELDTLVELIKRILEEITRVNKELVDEVRKLLEEIVRINERSVRTIEKILRDIAELIRRGREDDRVKEDVKRRIEELKREHEEVEKKIREAIRRLEEESKRLEEDVRRMIKRLREEVERRRADEKVRRLLEELRRLLEELLELHKRLLELIREILERVLEVDKRSLDRLTEILERVLRMSDAGRPEEELEKELRRLKKELEEVVRKSREDLERLKKELEKIVKESEDELKKVEEKVKKLADDARR

SEQ ID NO: 13017 - protein, 245 aa, Artificial Sequence; identical to SEQ ID NO: 13016
  Synthetic

SEQ ID NO: 13018 - protein, 245 aa, Artificial Sequence
  Synthetic
TEEEVLRKVEKLIKDLLDVLRDLLRASEEVVREALRVLEELIEENKRVIEELSRALSDERRESVERMLRKNEERLKKILEDADRVLDKWRRLLEELSKKAKRVLDEVRKRLEEIKREVPETEKLRTLLTILEEILRRLEKIIRDILRINERLLEKLKRILERLRETNREIDERIRKLVEERRGAEERKLRRDLTETKKELEKRHEDLRRELEKLLRDYKRELEEIERRLEEIEKTLKRRADETRR

SEQ ID NO: 13019 - protein, 245 aa, Artificial Sequence; identical to SEQ ID NO: 13018
  Synthetic

SEQ ID NO: 13020 - protein, 238 aa, Artificial Sequence
  Synthetic
SDLERLEKEIRDLLDELRRLTEELEKRSRDILKRLKEILEELKRRIERLLDELRRRRGDTEVLKEVARVLETVLKLLEDVVRELEKLNKELLEANRRLLEEVERIVREVLRVLKEGRDKEELRRVLEKLREDIREVDERIKKINREYRKRVEEIREKLREAIRRAEELIRRIVEKIGSEDDSVRELIEVLKKALEDVRRVLRAIEEIVRRSVELNEKHSRELRRVLKELLELVAKAAE

SEQ ID NO: 13021 - protein, 238 aa, Artificial Sequence; identical to SEQ ID NO: 13020
  Synthetic

SEQ ID NO: 13022 - protein, 231 aa, Artificial Sequence
  Synthetic
SEEEELRKLAKKIEEVIKTSRDKLDKSRKELEKVIRDIERRLRELRRELEELVRRGLDEESLREILKRLIREVEEIARTLEELADDSLRKNKENIDEIKRLVEEILKKLEDNNVSEEVLEDVKRRIEELEKEAEEIHRRYKTELDKIKKKIRDILEELKKEVKRIDDEIKAGRDREDVLREIEKLLEEILRALRKLLKDLLDLHDEVLKADEKLLKRLREIVKKVLEEVRK

SEQ ID NO: 13023 - protein, 231 aa, Artificial Sequence; identical to SEQ ID NO: 13022
  Synthetic

SEQ ID NO: 13024 - protein, 231 aa, Artificial Sequence
  Synthetic
SEEEKLRELRKRLEDTVRRSKEELEKSTEELKDVIKKSEEKLEELKRRLEEMKRRGISEEAIKEIIRRLLESNRRNLEELRKLLEESLRKNRENLEKIMRLLDEVIRTLEENRVREEVLKEIRDRLREIKERAKEIHKEYKEELERIKERADRIHKEVKEKIEEVERRIEAGTDSEKLLTDAARILDDVVRVDRELLRLVLELHKRLVRADEKLLTDIRELARRVLEETRK

SEQ ID NO: 13025 - protein, 231 aa, Artificial Sequence; identical to SEQ ID NO: 13024
  Synthetic

SEQ ID NO: 13026 - protein, 236 aa, Artificial Sequence
  Synthetic
DEDERLRELRDRVRRSEEEDERRNKRHEERVKELEDEDKERNERHRKRLKEITDRLKERNTDDRVREILDELKRVAEEVNEVNERATKELSDLLKTLNDVNREASKLNVEAIERLLKLVKDGSPREEIEKRYRDIVKEIEERYEELLRRAKKILEDIKRKYDRLLERLEKIIDELRKNDIREDLLKVVRDSLEILKELIRTVLKAIEESLRILEELIERLKRHIETILRLAAETTT

SEQ ID NO: 13027 - protein, 236 aa, Artificial Sequence; identical to SEQ ID NO: 13026
  Synthetic

SEQ ID NO: 13028 - protein, 237 aa, Artificial Sequence
  Synthetic
DEEELEKEIKKLLEEATKKHEDVKREIKERLEKLRRDHEEAEKRVRDELRRLEEELERRNSDERTREAVELLKEIVKEILELVKRHVEKNAEIVERAIRLLEKHHKENKEIIREIIELLKRVTDRDRIREELKRLLDESEDSVRRILEEVEKLIRESEESVERIRRRLEELLKRLKDRAPDAEDLIRVLKKLIEDLERLLTKNRRLLEEIVKILTKLLKDNRDLLRRILRKVEETAK

SEQ ID NO: 13029 - protein, 237 aa, Artificial Sequence; identical to SEQ ID NO: 13028
  Synthetic

SEQ ID NO: 13030 - protein, 239 aa, Artificial Sequence
  Synthetic
DEARRIKEIVDRAVEIWRRLVEEIKRIVKEVLDKWRKLIRELIELVRKALEDLRRTNGAKEDVLRKIEEEAKKIIRDVEDLLKKIADKYKRIIEELEELLRRLTEKYKEIKKELDKGVDKKDVVKRLEELNREVLETVRKVLEDLARLDEDVLRTIAEILKRIAELIKRVLEAVIRDKGKTDELKRLEDDVRKKLKDLEDKLRKLRKELEETHRRLAETIRRIAEELERLHRELKRESK

SEQ ID NO: 13031 - protein, 239 aa, Artificial Sequence; identical to SEQ ID NO: 13030
  Synthetic

SEQ ID NO: 13032 - protein, 239 aa, Artificial Sequence
  Synthetic
SKDERLRKVLEDVERLLREVLKKHRKVIDDLRELLKRVVEIHRRVLEEILKRLEEEGIDETVLKRLDDAIKESEDSIRRVEELLEDVLRRSEEKAKRAEEDIRRVIEKLDRLARAGVPIEELVKELERLIDKLLRILREINRELKELLDRVIEILRRNNERLVRLAEDVLRRLRETGRVSDEVVERIRRTLEEIERRLRKTDKDLEKDLRELKKDLDRTDEELKRKVEKLKRELKETSK

SEQ ID NO: 13033 - protein, 239 aa, Artificial Sequence; identical to SEQ ID NO: 13032
  Synthetic

SEQ ID NO: 13034 - protein, 236 aa, Artificial Sequence
  Synthetic
DEKDRLEEEVRKLLKEAEDELRRLKRENEKLNRELKETLKRVKEESERLLRKLREDVRKDGTREESIKEVADRSIKLLKELLRILEEVIERSERSLEEVIKMLEDLIRRLEEILRRAGLREESLTKLKKKLEDVLKELRDMAKRYRDELRKIKRELEEAEKRYRKKVDELRRELEKGKPLEEVLEELDRLNKEVLKAIEEAAKKLEDLNRRVLEVLEDILRKLKEIVDEALKVLRK

SEQ ID NO: 13035 - protein, 236 aa, Artificial Sequence; identical to SEQ ID NO: 13034
  Synthetic

SEQ ID NO: 13036 - protein, 240 aa, Artificial Sequence
  Synthetic
KEEELLERLREVLKTDLDLLRDLVRTLKEDLDKDARLLEELVERLKKLLDKIKRLLEEEGAVSKDDLKRIEDRLREIKKELEKLLKEYKERLDKIKKELDKLLREYEEALRKLTKEARDLMREGNLREEVLKRISDRNERLIEEMAKKLRDVLRDNKRLVREIVEKLRTVLEDILRLVEEIDIDERVKREIRKDLDKIRREIEKIVKESEESNERSLEKIDRILEESKRRNERLKRELDR

SEQ ID NO: 13037 - protein, 240 aa, Artificial Sequence; identical to SEQ ID NO: 13036
  Synthetic

SEQ ID NO: 13038 - protein, 234 aa, Artificial Sequence
  Synthetic
SKKETIRKLIEENKDIIRKLAEKLKRLLEESERIAEEALRLIKELLERIERALRRVAKDIDEELLKELEKELRRLEEELKEILDRVRDLHRRLKEEIRKILEESKKLNEELEDRLRKDEDVEKLLELLERVHATDVRLLRELLKLLKKVHEDVVRLLERLLELLKRVLDRIVEELDLRDKELEKLLEDLEREIRRLKKRLKELSDRLEEKIRKIKRELDDLSRRLREKIERTRK

SEQ ID NO: 13039 - protein, 234 aa, Artificial Sequence; identical to SEQ ID NO: 13038
  Synthetic

SEQ ID NO: 13040 - protein, 240 aa, Artificial Sequence
  Synthetic
DDEKRLKDRLREALKRNEELLDRLRRRVEEILDRNRKLLERVRRELERVLKELEDLIRRGAPLEDILRRLREVIKELLELARRILEHNLRLNEELLERVERILKHNLDVVKELLDLVKERKGDTEELKKLLKRLKDLHDEVRKRLEEIERELRKLHRDVREELKKIDRRLEDRLRKVEEENSEDETVLRELVEELERVVRRILELLKRLSDASKRVVEEILELLRRLSEKTAKAVDDTRT

SEQ ID NO: 13041 - protein, 240 aa, Artificial Sequence; identical to SEQ ID NO: 13040
  Synthetic

SEQ ID NO: 13042 - protein, 235 aa, Artificial Sequence
  Synthetic
DDERRLETLIRLSRELIERVRKLLRDIIRTSKELIEEVLETVKRILDKIEELAKEVNLPREVLEEIKDELERILKELEDAVRDIERKYERLLTELEKMVREIEKKYKDLLEELEKGLDTKTILEEIKRLHDEVVEAIRRALKALEEIHREVHELIKRILDKLLEVLKKVVKVLEESGLRDEKISRKVEELEKEIRRLIEELKKKNEEVEKKIREIMKELDERSERLRRELDRTRD

SEQ ID NO: 13043 - protein, 235 aa, Artificial Sequence; identical to SEQ ID NO: 13042
  Synthetic

SEQ ID NO: 13044 - protein, 242 aa, Artificial Sequence
  Synthetic
SKEDELRKELEEVVKRIEDALRKLKERSKRVAKRVKKLLDDLKKESEEVVESLREKLEKERVPERIVRTLEELIKTNRDTIDELEKVAKKLIKLHEDTLREIERLLRELIRLLREALEANVEDERFLRELEKRLKEVLDELERLLRESEDRLERVIKEIEDKLRESRRKLEEDIERVEREGTTESVRKLLEELRRLHERIIKIIEEILELLRRVHKEVAKDVRRLARELEELVRRLVETLRR

SEQ ID NO: 13045 - protein, 242 aa, Artificial Sequence; identical to SEQ ID NO: 13044
  Synthetic

SEQ ID NO: 13046 - protein, 240 aa, Artificial Sequence
  Synthetic
SAEEILDTVAELIKTHLKIVREVLKTVRDLNRRSLDLIRRILERMRRLVERLVRLIRNNGRERELRELLKEIEEDARRLMEELRRLHKEVEDTIRKLIEELRRLNERIKREIERLIKDLRDERVIEVLRRLLDKLRRHAEEVEKALRDNLRLNRELIKRLEEIIKETLKRLEELVREVERDGPVEKRLREVEEEVERRLDTVRRELEEVEKESDRLLEELEKKSEDFERDIRRLLKEAKT

SEQ ID NO: 13047 - protein, 240 aa, Artificial Sequence; identical to SEQ ID NO: 13046
  Synthetic

SEQ ID NO: 13048 - protein, 237 aa, Artificial Sequence
  Synthetic
SKREEIEKLLEDLKRDNKRVLDRLREVIKDNEDKNEKAVRDARELLERLKRELEEGNLDERLRDVVRRLLTELEEILKELEETLKRNNDEVRKLVDELRKTSRENLEKLRELVEKVREGTSDKTIRDAKRESEKKLEDIKKRIKEVEDKSRKTVEDIRRRIKEVDDKLRRTLEEVRRRDGDTEALKRLEEVAKELLKLIEEVLKENERSNREILRLIAELVKRNARVNEELLEIARR

SEQ ID NO: 13049 - protein, 237 aa, Artificial Sequence; identical to SEQ ID NO: 13048
  Synthetic

SEQ ID NO: 13050 - protein, 237 aa, Artificial Sequence
  Synthetic
EKDDRIREKVKEIERRNDKALDDIRRRVEEIKRENDEVLDRIRKELEDLKKEVEEVAKRTGRVDVLEDAKRALEELLRLIEEILRRSKEVLKRLLELIERALRESKRVLRELIKVIERRRDDKDLEDILRRHEEIVRKIVRELEKILKEHRDIVKKVVEELRKILEDLERRIREKGVDEELKKLLDKLLEDLRRIVKKLEELLKKNDDELRKIVKEVKDLLKRNHDELERIVREARR

SEQ ID NO: 13051 - protein, 237 aa, Artificial Sequence; identical to SEQ ID NO: 13050
  Synthetic

SEQ ID NO: 13052 - protein, 237 aa, Artificial Sequence
  Synthetic
SKEEKIERDVDEIRKENEEVLRRIRKKVRDIERENDEILRKIEEDLRRIEKDLERVAKERGRRDVLERLRELARELLELIRKVLEDSKKMLRDVIKLIEEILRLSIRVLDELLEVIRRKEDEDRLRKILEDHEREIRRVARELDRLLREHREIVKEAARRMEELLERIKKDIDERGVDEDLRELLRKVLESLRRIVERVDRTLKDNDRKIEEIVRELKELLKKNNDALRKIVEDAKR

SEQ ID NO: 13053 - protein, 237 aa, Artificial Sequence; identical to SEQ ID NO: 13052
  Synthetic

SEQ ID NO: 13054 - protein, 237 aa, Artificial Sequence
  Synthetic
SREEVFELLLDVLRKIVELIKDLAKKNIDVLKKLMELIDELVKINEKSLEDLLRLIREGRDERDIDRLIRENKKKNEEIVERLRRLLKELEERNRKILKEIEELIRELEKELRKKVRGEEVERLLEEIRRVLKELLEKLERESREVLRKAEEILRALERLSERVLKILRDLLDLRRRNERDEKELEDEARRLKKEYRDEVERLKKEIREIIERYKDALRKLEREIEDITRRLKERAD

SEQ ID NO: 13055 - protein, 237 aa, Artificial Sequence; identical to SEQ ID NO: 13054
  Synthetic

SEQ ID NO: 13056 - protein, 238 aa, Artificial Sequence
  Synthetic
SKLEDLLRRAEELLKDIVRANERLLEEIRKLLKEIVKANEDLLRKVKRLLEEAVEMAIRERGDKGEELDKIKEDLKRVIEKSRRDARRIEEKLKEVIRESRERLKALREELKRVEEMVRRGELDEDTVLRELEKIIRKLLRVHEDSLEKLIRLIEELNEVDKESLRTLVKLIERLERDIKLREEIVTRVRKKVEELKEEVKRINDEVRKKVRDLEETSKRILERVEDLVRELKERARR

SEQ ID NO: 13057 - protein, 238 aa, Artificial Sequence; identical to SEQ ID NO: 13056
  Synthetic

SEQ ID NO: 13058 - protein, 238 aa, Artificial Sequence
  Synthetic
SKEDKARELEKRLRDNLKKLEEVVRELAEVLKRNLEKLRRLAEELLRALKRLLDKLRAGGLPKDELEDLRREVEDVLRRLKDLLRKLKKANDESLTRLEELLRRAEEENRRVLTTLRELLRNNGDDRDLARLVARLVEANNRALEELLRLVAKNVEDNNRVLEELLRLVKELAKRLLARIRDEDLVRDIRRELKELEERARKILRDDERDLRALEKRIRDIIREDREELERLKERARK

SEQ ID NO: 13059 - protein, 238 aa, Artificial Sequence; identical to SEQ ID NO: 13058
  Synthetic

SEQ ID NO: 13060 - protein, 243 aa, Artificial Sequence
  Synthetic
KREDILKKLEDIIRDIIDKLRRILEKVKRLNEDIIREIKRLLDESLKTLEDLLKRIADKSRDRELEDILRRVLEKLRRSLDKLRDTLRKLKEETDTVLERAERTLKELKDRLEKLLRDAEKVSEEDLVEMLKRLIDELRKVLEDVIRVSKELVERLLRALREHLETNKRLVKELLDALRKTTGDDEEIKRLKEELERRHRRLEEEVERVARELEKRHRDLERDIRRVAEELKKLLKKLRDDRR

SEQ ID NO: 13061 - protein, 243 aa, Artificial Sequence; identical to SEQ ID NO: 13060
  Synthetic

SEQ ID NO: 13062 - protein, 228 aa, Artificial Sequence
  Synthetic
REKEELSEEIRRRLDELRKLLEEYEEEVKRLLTRLRDKLRRYKEEVERLLRKLKEDNKVDEEVLKLLEDLLKTNLDILEEILRLLEEIIRRNLDILRRLLKLLEELIKEVEKRGGGTEEVKRRAEDVKRKIEELDRRSDEEIKRLEKRIRELNTDSKRRAEEVLRRIEKKGVPKEAVDLVRDVLRRVEKVNRELLELIKEVADRVRERNKELVELIDRLLERLKRADK

SEQ ID NO: 13063 - protein, 228 aa, Artificial Sequence; identical to SEQ ID NO: 13062
  Synthetic

SEQ ID NO: 13064 - protein, 236 aa, Artificial Sequence
  Synthetic
SEEETVERLLEEARKRHEEIIKKAKELLDRAREEHERIIREAEKLLEEIKKRVDELVRDGQPAEEVLRDLERVVEEILEVLRRLLDANRRVVDDVLRVLEELLRVNEEVNRRIIETIRLPEEVVEELKEENKRLRDRLDKLVKDLKKTNKEIEDKLRKLAEELKEELERIADRIRKTGTDRKTLLREIEKLLKTLEDILRDLLRLVEKTLKELEEILKDLVDKARENLKRLRERIR

SEQ ID NO: 13065 - protein, 236 aa, Artificial Sequence; identical to SEQ ID NO: 13064
  Synthetic

SEQ ID NO: 13066 - protein, 234 aa, Artificial Sequence
  Synthetic
SKEEEIVKEVEKIVEKLLEVNRRALERIEEIVRKNLKVNRELVEEIERIVEELIRTGDVDERVKRELRRRLEKVKEDSERVLKKLEEDLRRVKRRSEDTLRRLREELKRLKEELRDGDRSGDELEEALKKILKKSEEHVRELEEIVRRLLEKSREHLEELVRIAKRLLDEARKRKNVPEEMLRRVLKKIEEVIRRAREEHEKSTRELEEVIKELKKRHEDVTREAKKVIDDLKR

SEQ ID NO: 13067 - protein, 234 aa, Artificial Sequence; identical to SEQ ID NO: 13066
  Synthetic

SEQ ID NO: 13068 - protein, 239 aa, Artificial Sequence
  Synthetic
SEKEELKRLLDKLLKELKRLSDELKKTIDKILKILKEVSEEVKRTADELLDAIRRGGVDEEVLREIKREIEEIEKKLRKVNKEIEDEIREIKKKLDEVDDKITKEVEKIKKKLDDDRVDRKEVIKALKEILKEHADVFEDVLRRLKEIIKRHRDVVKEVLEELRKILEKVAEVLKRQGRREDELRKVEEDLKRLEDKLKKLLEDYEKKVRELEETLDDLLRKYEETLRRLEKELEEEER

SEQ ID NO: 13069 - protein, 239 aa, Artificial Sequence; identical to SEQ ID NO: 13068
  Synthetic

SEQ ID NO: 13070 - protein, 234 aa, Artificial Sequence
  Synthetic
SRVERLEKLLEEHKRLVEDLIRLLDELAKKHDEDVRRLIERLKELAERLKRLLERSGVEEELLKRVDEAIKRIEDKLRRLEEHIKRVIDDIRRRLEELREHSDRLIEEIRDRLRKRDDEEVLRTIIELLRRNMERVLRLIEEILKLLEENLEVVKRLLEDVLRILKRIAEEIESRLTDKRDVDRIREEIKKLIEDVRREIKRVEDKHKKDIDRVKEKLDRVRDRHEKMAEDSKR

SEQ ID NO: 13071 - protein, 234 aa, Artificial Sequence; identical to SEQ ID NO: 13070
  Synthetic

SEQ ID NO: 13072 - protein, 241 aa, Artificial Sequence
  Synthetic
REKEELLRLLKEIAERILDILRKALELLDRVVELDNRTSKELLELSAELVKRILEAVRDGKPEEEIRKTLERVKKESRKIVEKNKRLNEEVLKELEKLVDELRKLLEDIKRKLDELNVPDEVRKVLEDLARLLKEVIDLLRRLLEENSRVSEEIVKLNEEALKTLEELVKRLVDLERKGTSEEEKKRLLDDLRRILREYEERVKKLNDEHKKLEKEIKDKVKRILDEIRRTLDKILKELRK

SEQ ID NO: 13073 - protein, 241 aa, Artificial Sequence; identical to SEQ ID NO: 13072
  Synthetic

SEQ ID NO: 13074 - protein, 244 aa, Artificial Sequence
  Synthetic
KDEERLVKKIRDSLRKYEDLLRKLVERIRDLLRRYEEELRKLLTEIEKTLEDVRDVLRRKNVDERAKEVAKRLVEAVKRLIEIVKRILEKTKRVVKKLEDLLRRAAELNRDVVEKILEIIKRKGPEDDFRRIVRRLEELHREVEDAVRKLVEDLKRLHREVVEELADIIRKLDKLLKEVERDIDLGDLLEMLRRLVERLKRLIERVLKLNRELVKKLLELLEEALRRNRRLVEDILKIADEARK

SEQ ID NO: 13075 - protein, 244 aa, Artificial Sequence; identical to SEQ ID NO: 13074
  Synthetic

SEQ ID NO: 13076 - protein, 236 aa, Artificial Sequence
  Synthetic
SDEDRKRKKLEDVERRLEKLLREYEEKVRRVLEELRRLLEENKRHVEELEKRLRDRAKKPNDDEVLERAVREVRKHLKDNVETDRKLLEDLKRALEESVRLVEEVLKILKELIDELKSKVPGEEAEKLEDDLRRVVETVRRLLEESKRKLEKVIREVEELNRELKELVDRVADEIRRKRLLEEALERLRRLLEELLRINERIIELIRELLEDNRRILEEILKLIKDLLRRAERIVD

SEQ ID NO: 13077 - protein, 236 aa, Artificial Sequence; identical to SEQ ID NO: 13076
  Synthetic

SEQ ID NO: 13078 - protein, 242 aa, Artificial Sequence
  Synthetic
SEEEDLEREKRRLDKYSEDDRRRAEKVLRELEEEVKKSRKRLEDAKRRLDEEVRRNEKLEEEVLRLLKELVKKVTEIHERSLDLLRRAAEKVIRINERSHRELKRIVEEVIRIKRRNGSEEELDKLIRDLRKSLDDVRKTSEKLVKDILEELKRILDESKTLADKLRRDLEKIVEDIDRRNLPEEVLRILKTLVKELEDILRELLKINEDLVRRLERILRELLKSNDNLVKELEKLLEKARR

SEQ ID NO: 13079 - protein, 242 aa, Artificial Sequence; identical to SEQ ID NO: 13078
  Synthetic

SEQ ID NO: 13080 - protein, 246 aa, Artificial Sequence
  Synthetic
EKKERIREALERAVRTLEKLLEDDKRELDKARREVRELLRRDKEELDKVVERVERELDRARERLDEDIERMVREVLELLKKHLDEVRRAVDTVLRLLKTHLDIIREIIKRLIDKIRDLLRLVARDGTREKDLKKVEDEVRELVEKLRRDSEKVEEDLRRTAKRVRDLNEEVRRRLDKKRKDVERKPTPRKLEEILRLLEEALRRNSETLEEILRKLEEILKRNRKTLEDLLKLVKEILDEIRERLR

SEQ ID NO: 13081 - protein, 246 aa, Artificial Sequence; identical to SEQ ID NO: 13080
  Synthetic

SEQ ID NO: 13082 - protein, 247 aa, Artificial Sequence
  Synthetic
SLTERVLDLARDLIRILLEIHKRALKLIAELVKKLLKIHEDVLKLSEELVEELLEIVARRLPREDLLRALKELLEKIEDVVRDIERRHRDLLREAEEVVEKLKREHEEVKERIERAVKKLAEDGVDKDKLKELVDVLEEILRLSKTTLEELVKALRDVIRKSLEALKENLRILRKIIRELEELERVDEDTLRRVLERIREEVERVKEKHRRLLEELKKLLEELRKRSKDLLEDIKRKVRELEEKTRR

SEQ ID NO: 13083 - protein, 247 aa, Artificial Sequence; identical to SEQ ID NO: 13082
  Synthetic

SEQ ID NO: 13084 - protein, 237 aa, Artificial Sequence
  Synthetic
REDEELTKRVEKILRDAERLVRKLHRENREILKTLKRLVEELEKENRKVLKDAEDLVRKERESKEKLLKLAEDLVKRNEEALRELVRLAEELVKRNVRVLEELLKLLTDLLRELKDALRRAGRRREDLDRRIDEARKRIRRELEELRKRHEELLRELKKRVKELADEHRELLDRLRKRDEDARELLKELKRIVKKSLDELRKLLKKLEDIVRESNERLKEVLKKITDLIRKVLEDIR

SEQ ID NO: 13085 - protein, 237 aa, Artificial Sequence; identical to SEQ ID NO: 13084
  Synthetic

SEQ ID NO: 13086 - protein, 235 aa, Artificial Sequence
  Synthetic
SEEDKIAEELKETLKRYRDRLEEIRKELEDKLREYEKRLEDLARELEKKLRKLEARDVNVRELLKVLRDVVRAIEKLLRENLKVVEDVLRAVRRILEENLKVVEEILRRVLKILREVKDEERARREIEKIVRKLEEVDKKIEEDVRELKRRLEEANKKLREDLKELKRELERVLRDRNVDEDVRRVVRELLRKLEDILRESEETNKETLEKIDEILKESERTNREVIRKLKETTD

SEQ ID NO: 13087 - protein, 235 aa, Artificial Sequence; identical to SEQ ID NO: 13086
  Synthetic

SEQ ID NO: 13088 - protein, 244 aa, Artificial Sequence
  Synthetic
SAEETLRRITEESKRVLEEITKKYEDLERESREVLRKLREDLDRIKRELEDVLTKGKDDKDEVLTVLEKVLDELLKLHRENLRVIKELLRKVLEVDRENLEVLKRLLEKARDLLRRSGRDEKDLKKLEDELRKVKEELEKKHEKSKRDIEDLERELDKVTEEVERLLRKLKEELRRAAENSDEDRERLARLLKKLADKLIRVLEEILKINEELNRKIIKFARENLERNRRVNKKVIEVLREAAR

SEQ ID NO: 13089 - protein, 244 aa, Artificial Sequence; identical to SEQ ID NO: 13088
  Synthetic

SEQ ID NO: 13090 - protein, 238 aa, Artificial Sequence
  Synthetic
SEDEKLKKEVDDVLERAKRLLDRLREANEDVLRKAKEDLDRLLKSNREILEELRKIKGLDEIEKIVRELLRENHEVLKRLVKLVKELLDLNLKALKDLMKLVEELIERLKRALRKKVPEEKLRKLDEEVRRIEEKLKKALEESKRIVDEIRRRLKEIEDKSRKIARDIEKELKDTKRAGPLEERVLERLLKALKEHSDELKKVVEELLKLLEEHLREVEKLVRELLADLKRLLDKTRK

SEQ ID NO: 13091 - protein, 238 aa, Artificial Sequence; identical to SEQ ID NO: 13090
  Synthetic

SEQ ID NO: 13092 - protein, 246 aa, Artificial Sequence
  Synthetic
SKIEELLTKLAELLKEVIDELRKNLKRLEETVDENLKTMEDLLRKLEEVVREVLDIATKKNPSEEAKRKIDALRKKVEDLVKRIKDILEKDKRDLEKVVRDSEELLRELERKVREVLEEVKKIVRDVKDKDELVKRILDLLKELLDDVKRVIKEHLRLVREVLERNKRSLDELVKIIRELLKAIKEVGLVDDEVRKRLDERAERLEKEVEEVKKENDERAKRSAEEVKKLLDKLDEALRRLEEEVR

SEQ ID NO: 13093 - protein, 246 aa, Artificial Sequence; identical to SEQ ID NO: 13092
  Synthetic

SEQ ID NO: 13094 - protein, 240 aa, Artificial Sequence
  Synthetic
SEDDELIKKIKKLAEEIIDEIRKLIEKSKEILKRLLDELRKLIEKSKKLLKETLDKLRKDKREAREDLERVETVIKRAAEEHDRLLKEIDDALKRLEEEHEKLLTDVREVLKEVKKELDELKDKNADRTELLDVLRKALEEAKKVLERLLKLNREAIETLERVLRKLLKLHRDVLARIEEDGLDEEALKELEKKTRDLEDEIRKVKDDVKRRHDELKEEIERVLDELRKVLKRLEDEARK

SEQ ID NO: 13095 - protein, 240 aa, Artificial Sequence; identical to SEQ ID NO: 13094
  Synthetic

SEQ ID NO: 13096 - protein, 250 aa, Artificial Sequence
  Synthetic
KTEEILKRVKEILDELAKELRDIIRESLRTIEELLDELRRILEESERTLEELVKTIKDEVKDKEELLRRLKRLLEDLRRKHEELLKRLKEAVDEHRDRLRKILEELERVLKELRKRIEELRRSLDRIREKDVLRKLEEVLRKALEILERLLKKIRESARELLKIIEEVLDRNIKVMEEALKTIKELLKDGPDEVKRRLEEKERRIRTRYEELRRRLRKRVKDYEDKLREIEKKVRRDAERIEEELERAKK

SEQ ID NO: 13097 - protein, 250 aa, Artificial Sequence; identical to SEQ ID NO: 13096
  Synthetic

SEQ ID NO: 13098 - protein, 239 aa, Artificial Sequence
  Synthetic
EELEDVLRRIEEVLREIIRLLEEHHDMVRRAVERIKRLLEDHHKKVEDILREIKRRIDKEDVKRTLDDILRRNNETLKRLKEELDRLLKENEDRLRKVTKDLKRLLDKAKELVDRIDSEEVLRRLAEIVERILRTVRKVLRDSIRILERLLRVAREALERSIKSLREILDTVEKALKDGPEKVKKELKDLARKAEKLSEDVRRELEETVKDLRRKSKEVEDRLDKLTEEIRRTLEEKRR

SEQ ID NO: 13099 - protein, 239 aa, Artificial Sequence; identical to SEQ ID NO: 13098
  Synthetic

SEQ ID NO: 13100 - protein, 231 aa, Artificial Sequence
  Synthetic
KDEERLTKTAKESLDHNKELLDRIRKKSKEVLDHNKELLDRIREEIKRLLEELDRLKRENRPKERIVEILRKILRTLEELLKRLIESLEENLRVLAKLLEDLIRSLRRNVELIAKDLEEDDELKKLEKEYREIERELRERLKTLEKEYRDLIKKLRESLEKLKRELEKLERDGVEVEEVIKEVKKMLERALEELREVNDRDRRANERALRILEALNEEDKRATKRVLERKK

SEQ ID NO: 13101 - protein, 231 aa, Artificial Sequence; identical to SEQ ID NO: 13100
  Synthetic

SEQ ID NO: 13102 - protein, 247 aa, Artificial Sequence
  Synthetic
REKEELLKLIKRVIELLKRVLEEHLRLVEDVIRRLKELLDSNEKIVREVIEDLKRLLDEVRDDKRRLDRIKEKLEEVLERYKRRLEEIKRDLERMLEDYKRELKRIEEDLRRVLEEVERIATRNEKPMEFLIDKLRKILERALRELDKLSKKLDELLKKVLEELEKSNREIDKLLKDVLRRVEEAGAEEDLLRKAKKVITEVREKLKRNLEDVRRVIEDVKRKSRRILEEARRLIEEVERELEKIRK

SEQ ID NO: 13103 - protein, 247 aa, Artificial Sequence; identical to SEQ ID NO: 13102
  Synthetic

SEQ ID NO: 13104 - protein, 243 aa, Artificial Sequence
  Synthetic
SKVERILRLIEELLRLLREALRKIHRINEELIRTLEEVLREIHRINEDLNRKLREATGRNDDLDRADTESEKLNRDLRRRNEEVLKRLRESNKRLKEENDRVDKKIKKLLEDLERIVKDRPEALEELVKILEEIIRDIERLLRKNREVHEENIRLIEELLKENIEAHERDLKLIEDLIRRENLPEELKDRVREELDRSRKKLRKLEEEMRRKLKRSREELKKLEEDLRRELKKLREELERIRR

SEQ ID NO: 13105 - protein, 243 aa, Artificial Sequence; identical to SEQ ID NO: 13104
  Synthetic

SEQ ID NO: 13106 - protein, 236 aa, Artificial Sequence
  Synthetic
SRKERIKRALEEHIRKLKEITDEVRKTNEELLELTRRILEEAKKANEELVKKIREALDKVKELEEEIRKLIEESERIVEELEERSKELLKRSREEVEEWRRRSEELLRRLEKILRDVKDEKELVERAVKILRDDSRIAKEILRRNLRLIEENLERLKEIIERNLDLLRRLLELLKRAGVDEEALKELEEKLDRYRRKLEDLLRKYAKKLEDYKRKVKKLEEENEELLKRIEKEMEK

SEQ ID NO: 13107 - protein, 236 aa, Artificial Sequence; identical to SEQ ID NO: 13106
  Synthetic

SEQ ID NO: 13108 - protein, 226 aa, Artificial Sequence
  Synthetic
SEKEELEKRLRKKLEEIKELVERYKRRLEELLRRHREELKEIEKRLEDLERKIEELDVPERVKKLLRDLIRVLREWLRRSHDLLRRLLEVSKKALEDILRLLEKLLKEIKDLEDEDRLEERIDKVLKDLKRIDDRVREMVKEVLERDDRLARDVKKKVEEVLRELEEAGVSEEVKKIIEELLRLAEEVLRRNKRLIEALLELHEDEFRKVEEIIKELSEEAKRASK

SEQ ID NO: 13109 - protein, 226 aa, Artificial Sequence; identical to SEQ ID NO: 13108
  Synthetic

SEQ ID NO: 13110 - protein, 238 aa, Artificial Sequence
  Synthetic
REKEKIREALETNLRLLEELIKRLKEILDTHNELLRRVIETLERLLKELLELLEEAGLEEEVLREVKRLVDELRKEARRVLDEHEKLVRKIKKEAEDVKRESEEIIKEVEDKLEKLDREELLERVRRVLKKSDDLIAELVRRALKILEELTRLLAELLKKVVEILRRIVELVERVLTKKGAPKEDLERLRRKVEELEDRLRRLLEKLKRDSDELMRELERILDRYRRESEELDRRLAE

SEQ ID NO: 13111 - protein, 238 aa, Artificial Sequence; identical to SEQ ID NO: 13110
  Synthetic

SEQ ID NO: 13112 - protein, 232 aa, Artificial Sequence
  Synthetic
SELERLRKILDDLRKKVERVAEEHKRANDKLAEEIRRVLKTHREMNERAIEEVKRTVGDDERIREVLKKVLKESEELLREVEELLRRILERSKDLLRELKEILDRVLREVEELLKRNTDSREALKLLEKLLRMLLEVSKRDNRLLEELLKLLRDISKRDHEVLKKLLDEIRRTNTDLREVDKRLRELLEEHKKLVDDLDKRARKVHKEHKDKVDKLREELEKTLRDIKRETD

SEQ ID NO: 13113 - protein, 232 aa, Artificial Sequence; identical to SEQ ID NO: 13112
  Synthetic

SEQ ID NO: 13114 - protein, 246 aa, Artificial Sequence
  Synthetic
DSDEIVKTLLEKLRRILKEVEEIARENHKRDRDANREINKLVEDIARRLEEVAERLREVIDERVLKKLKELLDRLREDLKRVDTENEELARRDEKRLEDVIKKIEELLRDLEKKLEEVKRRGEPREDLLRKALEVLKRIVELIDKLIKDHEKSLRDSVELNLRLLRRILEVVERVVELLERVLQGLDEKDLRRLRKDIERLKEEVKRALDELRKKYKKIEDDNRRLVERIRRELKKILDELDEKRQ

SEQ ID NO: 13115 - protein, 246 aa, Artificial Sequence; identical to SEQ ID NO: 13114
  Synthetic

SEQ ID NO: 13116 - protein, 241 aa, Artificial Sequence
  Synthetic
SEIEKVLEINRRVLKELERIVKKVLDIDKEAAELLRDIIRRVLEIIKKVIDDIIRTRGEQEDVRRVEDELRRTIKKLKELLDEYEEETRKLEEDLRRELEEVKKRSEEVEERAKSGRDKRDIDDLIRELHRLDRELVKRLRDRIDEVVRRNEELVKRLEDEIRRLERDLERLLREVLRRTKDKDLEEKLRRVLEELKRLVDDLRRLIDEIKKRYERMVEELKKEIERVLRENEEAVKDLER

SEQ ID NO: 13117 - protein, 241 aa, Artificial Sequence; identical to SEQ ID NO: 13116
  Synthetic

SEQ ID NO: 13118 - protein, 243 aa, Artificial Sequence
  Synthetic
SEEEELEKIAREVLRELKEILEELDDIYRRVTDRLRKLLERLKKEYEEVKKELEDLKRRKADVKDLLRVLRRLVKVDMEVLDKLLEIVRELSEADKDILRRILEVVEKAVKALKDVLDRAGEPERDVKKKKDDIDKKLEELRRELEDYKRRNDERLKRLEEKIEKYKRDSRKILEDIEREVKRDGPSEELVDRLIKLLDENLKRSEEVIREIIELARKNAEDSRRVIKKIIELLREMLKDARR

SEQ ID NO: 13119 - protein, 243 aa, Artificial Sequence; identical to SEQ ID NO: 13118
  Synthetic

SEQ ID NO: 13120 - protein, 249 aa, Artificial Sequence
  Synthetic
DSERELEKVLKDAKEKLDRSLEEVKKVTRETEKRIEEIDKEVKEVLEEADRRVKKIETDKERGDEERLARELTRVVRDIVRRLKDLARKLLEVVRRNAEMNHRINRKNNKVLRDIVRRLEEVMRRRGLDEKRVRELIERLRRLLKELEKEDRRINEEYKRVLREIERKVREVSKTLDKLLRELEERLKKEGLDERLIREIKRIIERVIEILKDIAKEILDLDRESVRLDTEVLKKLLDIIREVVKEAKK

SEQ ID NO: 13121 - protein, 249 aa, Artificial Sequence; identical to SEQ ID NO: 13120
  Synthetic

SEQ ID NO: 13122 - protein, 249 aa, Artificial Sequence
  Synthetic
DEEREVRKVLRRAEELLRRSLKKAEEVTRETRKRIKELLDELRKVLERAERELRRIRREKERGDEKKLADELEKVVREIVKRLEEILRKLLEVIRTNMRRNHEINRENLEIVREIVEELKRILEERGLPREDLERLVRKLEDLLRRNEKKDKDINRRYKELVDRLEELVKDITRRLRELLERLKKRIDETGLDDRLIEEIKRILEEIIKLIADLARRVLKIDEESVKLDEDNLREVLKILEDVVRDSER

SEQ ID NO: 13123 - protein, 249 aa, Artificial Sequence; identical to SEQ ID NO: 13122
  Synthetic

SEQ ID NO: 13124 - protein, 235 aa, Artificial Sequence
  Synthetic
SEEEEIKKDLERLIDKLRRTSKRLIDDYRRVLEELERTIKRLLEELEELIDELRRRGSLEEKILKVVEDLLRVLKKLLRELLELIERNLELIKRLNEELLRVVEKILKVLAERSTADEDLTRVLKELKEVLDDLVKKHRDSLEELKRVVKRLKDELEKVLRDAKRVLDELKRDGVSEKVERALERILELLKRVIEELERLAEEVLRLSKRVAEENKKLLEEILRILEEIIRRAKK

SEQ ID NO: 13125 - protein, 235 aa, Artificial Sequence; identical to SEQ ID NO: 13124
  Synthetic

SEQ ID NO: 13126 - protein, 248 aa, Artificial Sequence
  Synthetic
SKEEELEKLVRKVEEDLKRLEEESERIKKEIKDTLRKIRKRSEDLKRKVKELLRRLEEEARRVRLEEAIKIIKEILDELAKVNEDIIRIIKELLKRLVDTNRRVIETIDRILKKLVDDLRRANLPEDKLREVERELRELKKELEEIVRESEKMLKELEDKLREIVRESRELLEKLRRDLKRIKDGNLRVDEALEMLKRLLDKALKVHEDVLRKLVELVDEVLKVHEESLRKLLTLAKKVLEVLRKITK

SEQ ID NO: 13127 - protein, 248 aa, Artificial Sequence; identical to SEQ ID NO: 13126
  Synthetic

SEQ ID NO: 13128 - protein, 244 aa, Artificial Sequence
  Synthetic
DDERRKLEDLERMVEELKRKSDKLLKEIREEVERLERETRKLLEELKRKVDELREDLRRNPEDRVLRKLVKLLEDILDKVRKLLKENLDLLKRLLDIIEKLLRDNVRLLEELLRIVRELMKTKDEEKLTRKLEKALKEVRDAARETRERLKEAKKEVKTVADRNRKRLEELEEEVKRVLDEIRKEKGPSEDLEKAERLVKDILRLNEEHTKELEDVVRDLLRKLEKHTRDLEKLVKDALDKVKT

SEQ ID NO: 13129 - protein, 244 aa, Artificial Sequence; identical to SEQ ID NO: 13128
  Synthetic

SEQ ID NO: 13130 - protein, 246 aa, Artificial Sequence
  Synthetic
SEKEELLKRLEDVLRRIKERLDELRRRYKKALDELREESKRLIEKLDKVLREIEELIKRKDRDLKDIVEAIKRLNDEHLETLKEIVKKIMRIDEEVLKKLEDIAREIKEELDRILKTLADEGLPEKKLEDIARLVTEIKEELDRILEKIRKDSTDSNKELKDIIDEVRKLHERLKRELERLAREEKSEEILRLLLELLEESIRVAREVNRLLLRLLEKNKELVEEVLKRLLDLLKKIIDIVREVIT

SEQ ID NO: 13131 - protein, 246 aa, Artificial Sequence; identical to SEQ ID NO: 13130
  Synthetic

SEQ ID NO: 13132 - protein, 244 aa, Artificial Sequence
  Synthetic
SKIDEALKKLRKILEDAIKLNKELNDTTREILKEIIKLNREVLEKIRRILKELVDLILKDLKDDEEAKKELKKVLEEVRRRLEEIKKETDRIVKEVEELNERNDREVKRAAEEVRRLLEEIKRSDRDEKELIKKLKEIVDRIREAHRRSVEELSEVVKRILDALKDTLRKLEDVVRKLLELARRIAGDTEELRRVVEKVRKELEDDKERYKRLEEEVRRLLEEMKRRSEDLERKVEEILRRLTE

SEQ ID NO: 13133 - protein, 244 aa, Artificial Sequence; identical to SEQ ID NO: 13132
  Synthetic

SEQ ID NO: 13134 - protein, 237 aa, Artificial Sequence
  Synthetic
SEKELLEDLRRKAKEVKDRHEELLRDLERTLKKLKDEHDKKLKDLRDELRRVEKKLDDKERTEALERVKEVLRKLLKLVEDLVRRNKEVIDKLLELVRELIERNKKVLEELLKLVEDLSRKRSEDVERVIRELREILRKLHETNKRILDELRRLLEELERENRKILEEAKRLLEELEKKVDDKELLKEVKDLLRKLEKVVRDSLELLKRLLEDIEKRVRDSNRELKRILDDIEKKAK

SEQ ID NO: 13135 - protein, 237 aa, Artificial Sequence; identical to SEQ ID NO: 13134
  Synthetic

SEQ ID NO: 13136 - protein, 235 aa, Artificial Sequence
  Synthetic
DKEEELLKKLEEVLKKAEDLIRESNKALKELLDEAVKIVEDSLRELERTLRDIERKVDKDEVIRRLRELVRELTERNKEALTRLREEFKRLHDENKKILDDLRKLVDELRERVKKTKDSETIIRLISKVLDDLLRLLDELVKRNTEALKKLIKLLEDLVRENKRVLERLVELVKRATGETEDLRETEKDLRRLSEEHKRLLEELRDKARRLTERHEKALKEIEDELRKIKDEARR

SEQ ID NO: 13137 - protein, 235 aa, Artificial Sequence; identical to SEQ ID NO: 13136
  Synthetic

SEQ ID NO: 13138 - protein, 239 aa, Artificial Sequence
  Synthetic
DEEEKIREDLERTLREYERELRRAKEELKETLKRYEEELREVKEDLDRTLEEVDDLLRRGELEDREAIRILRELLKKLEEIIRRSKEVLDKLIKDLEDISRRSIEVLEELVKKVRKDGLPEEVLRRIKDLIRRLRERNKEILDRIRKLIEELVERNKRALDRLRKLIKELEERVRRTDDKKTLLRDLKEALKTLIKLIREILEDNLRVLRRIIELIETLLEDNRRVLEEIIKLIEEATT

SEQ ID NO: 13139 - protein, 239 aa, Artificial Sequence; identical to SEQ ID NO: 13138
  Synthetic

SEQ ID NO: 13140 - protein, 238 aa, Artificial Sequence
  Synthetic
STKEEVERIVEELRRAHEKSLRDVKKILDDLAKIHDDSLEDARRIIEKLDRILEEIKDRDKSREVVETLTRLLEEIEREIRELVRKNRELLRRITERLKELVRRNEDVDRRVREKVERVPISEELLKLIEELSRTNRRVLEALERLARELLKTNERVLEELKKLLDRLLELVKRITDDGVEDDKLLEDVKEEIRKVKERIEDLLRRSRELLERLRKRLDDLLADSERKIDEVTKRTRK

SEQ ID NO: 13141 - protein, 238 aa, Artificial Sequence; identical to SEQ ID NO: 13140
  Synthetic

SEQ ID NO: 13142 - protein, 244 aa, Artificial Sequence
  Synthetic
DELEKVERLLEEIEKIIEDLIRRVEELVRRILEFNKTTLKRNEELVRELEKLVEETTGRTEELKKIVEKLEKLHREVKKKSDDLVKRAEELLKEVKERLKEIVKTIREELRKVKESDRDRKELLKLLAEILDKLLKLLKRIIEELLRILKELIKASKESLDDLKRINEELLRDIEDLIRKKIKEKKEVVRKLEEDLRRVRERSKKLVREHEKFLEDLEETIKEEKRRVDEELKRIKEEIKETRR

SEQ ID NO: 13143 - protein, 244 aa, Artificial Sequence; identical to SEQ ID NO: 13142
  Synthetic

SEQ ID NO: 13144 - protein, 242 aa, Artificial Sequence
  Synthetic
SEKERLMRLLDKLKDLNRRLVERIKELLDKALELHKKLVKELRELLERLKELVERAGVPEELLTRIDELIKKLEDEARKISKEVKRLIDELKKRLEDIHREVDRLIRELKETLKRVTDKDELLRRVKEVLERIARLSEELIREVKEVLEKIVELSRELLKRVLDVLRRIAELLEDALRKENVEEETVRRLREALKKLEDDLRKIERDAEREYKKLKDELEELTERYRREIRKLKEELKKDRK

SEQ ID NO: 13145 - protein, 242 aa, Artificial Sequence; identical to SEQ ID NO: 13144
  Synthetic

SEQ ID NO: 13146 - protein, 243 aa, Artificial Sequence
  Synthetic
SKREELKELLERLLKLDRDTLEELKRLLDELKKTNDDTLEILKRLLEEVLRVIRETGLPEDILRRAEELIRRLKKKLEEIVRRNEELIRRLREDLKRIHDEIRKLIEDLKRDLDRTKDERTILKLVKEVLERISDLNRKILDSVRRAIEKDVKSNEEILDLVREALERLAKLVEDAVREKIREDKDRVREIERRLEELRKRLEKVERDLRDRHRKVKKKLDDVIEKVKRRHDELRKELEDAER

SEQ ID NO: 13147 - protein, 243 aa, Artificial Sequence; identical to SEQ ID NO: 13146
  Synthetic

SEQ ID NO: 13148 - protein, 250 aa, Artificial Sequence
  Synthetic
KDEEEVEKEIRRLLEKVKDVLRRSLEELERLLREIKEVLEKLEREDEENIERIKRELERQLPSEDLLRVVEELIRSNVTLSKRALDEVKRLIRRLVDVSRRALEKAIELIREAVELLERALKRKGLPREEVKRLRDEIKKIEDRLKELLRRYEEEVEKIERRLEELIRRYETEVERIERRLEELRRANLDRETLIREIEKILRRLNELNRRLLREVERILERLLELHKRLLDELLRIAERLMRLVEEVKK

SEQ ID NO: 13149 - protein, 250 aa, Artificial Sequence; identical to SEQ ID NO: 13148
  Synthetic

SEQ ID NO: 13150 - protein, 247 aa, Artificial Sequence
  Synthetic
SEAEDLEELIKELAELLKDVIRKLEKINRRLVKILEDIIRRLKEISKEAEEELRKDTVEDKDILRDLERRLREILEESDRLLEELKRRLEEILRKSKELLRRLEEVLREILKRAEEVKRSNLPKEELIKEIVKLLEELLRVIEKILEDNIRLLEELVEVIKEILEKHLRLLEELVRVIERILREVRKDKDEAERRRRELKDKLDRLREEHEEVKRRLEEELTRLRETHKKIEKELREALKRVRDRST

SEQ ID NO: 13151 - protein, 247 aa, Artificial Sequence; identical to SEQ ID NO: 13150
  Synthetic

SEQ ID NO: 13152 - protein, 242 aa, Artificial Sequence
  Synthetic
DEVEKLKKLLKELEELNREVVDTVKKLLDELVKLNRDVLREVRELLKKLIDALEKTGIDDTVRRRLEDIERELEKVLEDSERKLRRIKERLDEVVKESKERLERLREELDRLARSNLPREELLDAIARVLRKILKVHEDALRKIEKLLRDLLRIHRTSLREIERLLRELLEVIRDVLDKRNVDEELRRELKKLEEEIERALERIRRRSEETADRIRRTLEKLREKSERKRREIEDTLRKDRK

SEQ ID NO: 13153 - protein, 242 aa, Artificial Sequence; identical to SEQ ID NO: 13152
  Synthetic

SEQ ID NO: 13154 - protein, 249 aa, Artificial Sequence
  Synthetic
SLLEKVKKVIERLLEIHKKLLEELKRLIEKVLRITRENLEEVKRLIKRAVEILRRIAEEKDKDTVEKLIRDLERELEKVLDDSRRLAEELERELEKVLREWEEKSKRAMEELDEVIKRLIKEAGDRSEKLRIVEEIVKDLERADEDVIRKVKELLEEHLRLHRELNRLIKEVLDDLLRALRELAESRTREEEVTRKIEELRKKLTKLIRELEETLKEVKKRNEDALRRLEKESKDLAERVRRLIEELEK

SEQ ID NO: 13155 - protein, 249 aa, Artificial Sequence; identical to SEQ ID NO: 13154
  Synthetic

SEQ ID NO: 13156 - protein, 240 aa, Artificial Sequence
  Synthetic
SDKEEIKRRVEKTARDLETEHDKIKKRLEDTVRDIKRELDELLEKYERVLRKIEKTLREGDKDVTDLVDKLLETVKRLNEEVLRTVKKIADELRRLVEEVLRVLRESNETLARLLEEANVRDEVRERLEEVLRRTEEIIKTLEEIVKRLLDELRRLVEELRRISKKLKDELDKIKEKDKDEKRLIEEVVRLLRENLDVVRRILEALAKLIKELLEALEEVLRRNKELIRELLRVLDEALK

SEQ ID NO: 13157 - protein, 240 aa, Artificial Sequence; identical to SEQ ID NO: 13156
  Synthetic

SEQ ID NO: 13158 - protein, 248 aa, Artificial Sequence
  Synthetic
DEEERVKKLLTDLRRLLRKLHEESKKLLDELRKKLRELRRRSEEKLREVERRLREAEKKLPETRVLKLVADVVKKVLDAIRDLNRKLEEIIDEALKLLEELDDILRRVVEEALRLLKEIKDTKRDRKEVKKRVEDILKRLEELVKEYEDRVREIKKRLRRALEELRDEYRKIREDIERVLDELRKGGVPEELLRVLEELVRTLKKLLDENLKMVERLIRELEKVLDDHERKVRRLIEELLEVLDRDAK

SEQ ID NO: 13159 - protein, 248 aa, Artificial Sequence; identical to SEQ ID NO: 13158
  Synthetic

SEQ ID NO: 13160 - protein, 248 aa, Artificial Sequence
  Synthetic
DEDRIIEEIARLLEELLRELLELIKKLIETNRRLNEEHERAVRELARLLEELLDRLVKKVIEDEKLKRIRERLKRALDDLERLHREINKRLEDLVRELEKLVREILKELKDALEELRRASARAGGEEVLRRLEEIVKKLLDLVRRILERLKEIHKDNVRLLRELNERLTRIVEDLVRLIREILREAGVDEKIKKEIERELEELRRMIKRLHEDLERKLKESEDELREIERRLEEKIRRLEEKLERKRR

SEQ ID NO: 13161 - protein, 248 aa, Artificial Sequence; identical to SEQ ID NO: 13160
  Synthetic

SEQ ID NO: 13162 - protein, 251 aa, Artificial Sequence
  Synthetic
STEEKLRELVKRLEELLRDLERLLRELEKSNRDLNETALRLVEESDKLLEELLEKLARNNVVDEELLRRARKELKRLIEENKKIAKEINDRTEKLVRELRTLLDRLREELKRLIEELKKLLKDGLPDEDLLRDVKRAVEEVLKILRDLLTKVEELDKRNVDLLRKWLEVNRKIVEDVLRILEELLKRDAREDKDTVKRLKEDLDKARKDHEKKLEDLERLLKRNEERLRKMKKELEDKVERLRRELEKKRK

SEQ ID NO: 13163 - protein, 251 aa, Artificial Sequence; identical to SEQ ID NO: 13162
  Synthetic

SEQ ID NO: 13164 - protein, 251 aa, Artificial Sequence
  Synthetic
DEEEKIRTTLDLLRKLLKVLREILEELIRSNKELNERLLRLVEDSDRLLEELLKKLEDDNVVDEEALRRIKKRLEDLIRTNREIEERIDRESERLAEELRRILRELEKELRRLIEDLKEVLKRGLPREELLRRLKKVVEDVLRILEEVLRVVDELDKENVRLLREWLERNKEIVEEVIRILEDLIRKRAREEEEKVRDTEKKLRDLREKHKEIAKELERLLRENRRRLEELKREAKKVLDELRKRLEDERR

SEQ ID NO: 13165 - protein, 251 aa, Artificial Sequence; identical to SEQ ID NO: 13164
  Synthetic

SEQ ID NO: 13166 - protein, 240 aa, Artificial Sequence
  Synthetic
SEKEEVEKRLKDLEEESERLLKEVRDTLKRLEEESKKLIDELRRKLEELRKEVKELVDRGRDVKDLARELLRLLEELLRDLKRVADESARRNEELVKELKRLIDESLKANTDLAEEIKRTDNTDERKLRELERVLEEYRRRIERLKEELDRVLEKWKTEIKKIKKELDDVLRKAEEEVEKNKTVDKALTKVVDDVLRVLERVIERLLRLNKESLKELERILEDLRRLNKKTLDVLREVTR

SEQ ID NO: 13167 - protein, 240 aa, Artificial Sequence; identical to SEQ ID NO: 13166
  Synthetic

SEQ ID NO: 13168 - protein, 240 aa, Artificial Sequence
  Synthetic
KEKEEVEKKLKEAEEEHRRLNREVEEDLKRAKRESERLLEEMEKKLDELEERVERLLREGRDVDDLIRELLKRVRDLVRELKKLIDESAKLVRELVKRLKKLADDNLELVRRLVKEIIDRINTTEDIIRELKKVLEKYEKRVREIKKRLDEVLKKWEDEIRKIKEDLDRVTKKIEDDVRKNRNVREVLEKLVRDALRTLREVLDRLRRLNEELLEVLRRVLRELERLTRELLKVLRDALK

SEQ ID NO: 13169 - protein, 240 aa, Artificial Sequence; identical to SEQ ID NO: 13168
  Synthetic

SEQ ID NO: 13170 - protein, 250 aa, Artificial Sequence
  Synthetic
SEAEEVARRIKELVRELEKLLRDSEETIKRLIDKNRDLLRRIAETIDKLIKDLRDLLRRIKGEDLLEAIKRAIKTAIDVLDKLLKLDKTTLEELIRVLERNLEEIRRVVEELIEVLRELARRRRVSEEIKRRLEEKVKELRERLERARKRHKDAAKRLRDSARKLEEELRRLADELRKELEELERQGDVKDEDVRRALERVEKLLREILERLKRHSEELAELARRLLDENRRIIEEIIKLIEDILRELKR

SEQ ID NO: 13171 - protein, 250 aa, Artificial Sequence; identical to SEQ ID NO: 13170
  Synthetic

SEQ ID NO: 13172 - protein, 249 aa, Artificial Sequence
  Synthetic
DLERLVEELARLLKEALDTLARHSERLIKLAREILETLRRHSERIAELIERILRELMERRGRTEDIERVKKRVEDIIEKNKELLRRIKRRIEELAKKNRKLLDEIRRRLEELIKRLEELLREGRPEEEALRLLAEMVRRALEVLKELLRRDAETVEELLRVLKELLELNERTIRELETILDELVKRAGLPEELKKKLEDISREIKKSLEEVEERLRRISDDVRRSLEELKRILDEIEREIERRLREAKR

SEQ ID NO: 13173 - protein, 249 aa, Artificial Sequence; identical to SEQ ID NO: 13172
  Synthetic

SEQ ID NO: 13174 - protein, 246 aa, Artificial Sequence
  Synthetic
SDEERLRKEIRDRVEELRKRLDDTEEEYDKRIRDLRRKIKEVEDRYREKIKRLEEKLRRGELSTELLLEAIARTSEEVNRILEELLREIADLSREVLEKLRRLAKELEDLVEEILRKLLARRDTERIREIVRKLRELVDEVRKRLEDIIRENEELLKKAEEDLKRIVEENEKLIRDAADRIRKIKDKDTVLRILKELMDRDEEILRRILKLIKELLDESKKTVRRVLELLKELLRKILKLVEEITR

SEQ ID NO: 13175 - protein, 246 aa, Artificial Sequence; identical to SEQ ID NO: 13174
  Synthetic

SEQ ID NO: 13176 - protein, 237 aa, Artificial Sequence
  Synthetic
SKKEILKEVLRRILKLIRELIETIKKVLKRSLDLNKELIDINKEALDRILKLLTDIGLPEDVLEEIKRAVEKLKKRYEELLKKYKEDLERIKRRLEKLKEEIERKVKKLEELVDTISLEEVLERIDKLVEDVLRTVEEVLEELRKLNKESLDTSREMLRRIKELVKRVIEELERAGIDKRRLKKLADELKEILDRLREKNKEIADRAKELHDEVRERLKEIAKRLKDVLRDARERVR

SEQ ID NO: 13177 - protein, 237 aa, Artificial Sequence; identical to SEQ ID NO: 13176
  Synthetic

SEQ ID NO: 13178 - protein, 238 aa, Artificial Sequence
  Synthetic
REMEEVLKRNLDAARRVLETLKRILDRLKELNERSLRSLRDILRELLDIAREVLDLRRAGSSEELKRRTEEKIKKLVKEIDERLEDLLRRYEEEVKKIEETLERLLREYEKLLKKIREEMGDEDEKVKKILEVLERSKKIIKELLEALKKVAKDSLRLNRELVKVIKRVIEEIRRLIREQDDIEKVRKDVEDLAKELEDRLRDVERESRRLLEELRETLERALRRVKELHDELREAIK

SEQ ID NO: 13179 - protein, 238 aa, Artificial Sequence; identical to SEQ ID NO: 13178
  Synthetic

SEQ ID NO: 13180 - protein, 237 aa, Artificial Sequence
  Synthetic
SRKEELLRILRRILEIAEEIIRDLKKWLDDDRELVREILELIKRLNEDNNRLIREAGLREEVLKELEDRSEDLKRKLEKLREDYRRELKRIEDKLEELKERLRKVVEDLERLIEKMDDKEVLDELRRLIEEAVRALEEVLKEILELSKTVIERLKDLLEEDKKIVKKVFDMLRRDDKREDELRRLEEALKESKRLVEEVLKRIEDVLRESKKLADEIRKKIEDLVRELEEELERVAR

SEQ ID NO: 13181 - protein, 237 aa, Artificial Sequence; identical to SEQ ID NO: 13180
  Synthetic

SEQ ID NO: 13182 - protein, 244 aa, Artificial Sequence
  Synthetic
SKEEKKKELEKKAREIKRRLEENKREYKEKVDRLKEELRRLLEEIREKVKRLEERIRRAIDKEEVVRLLKTILEELLKILEEVLEEIDRLVDENAKAHKRLLDVLKKILEDLLRILEDVERRDKSRELEETVERRIKRLEEKIRKVEEEYRRVVETLKREYKKILDKLEKLAEELKRKIEEVRKRNVLKDLVKELEDVLKELLDLLREILKTVKRVNEDSVRSAEKLIEDLERMIRELLKEARK

SEQ ID NO: 13183 - protein, 244 aa, Artificial Sequence; identical to SEQ ID NO: 13182
  Synthetic

SEQ ID NO: 13184 - protein, 234 aa, Artificial Sequence
  Synthetic
DERERIEEDLKRLRDTLDTKEEESRRRIRELEEDLKRKIEESRRRIEKLKRRMEEDGAPGELVEILERAERANERNLKLIAAILDLIKKANEETLREIRRILDEIERVIRELERLDRREDEVRKRLRDILRKIREEIKKIERRNDKVLRDIKELIDRIKTHLKKVLDDVKRLLDEIEPSEILDRLRKVLEELARRDRKILEDLERAVRELDKLDRDILRTLLRVAEELLRRREK

SEQ ID NO: 13185 - protein, 234 aa, Artificial Sequence; identical to SEQ ID NO: 13184
  Synthetic

SEQ ID NO: 13186 - protein, 252 aa, Artificial Sequence
  Synthetic
DKLEEILKLLKEVIKTLLRLSEDLNRLNRELVRTVLELLKRVVELLKRVLEEVRKKVRDANTVPDEVIERVARELDRLLKELEDDIRRVAKELEEVHRENEKLLRDVVRDLERLLERLKRELDRNLPEKDLLKTLEDVLRELLKIIARLVELNKRSNRRSTEIIDRIVKSLERVIEELLKIIDKLAKALDDRRDKVERDVRRIKEKIKRILDDLRRRVEELKKKNKEDLEKYDEDIRRLEEEIKRLLEEARR

SEQ ID NO: 13187 - protein, 252 aa, Artificial Sequence; identical to SEQ ID NO: 13186
  Synthetic

SEQ ID NO: 13188 - protein, 235 aa, Artificial Sequence
  Synthetic
REEKELLDEIRKRVKESEDRLEKLLRDYEKELRRLEKELRDLKRRIEEKLEELRRRNLDFKELLKTLEDLLREVLEVARRVVETLKELNRRVLEVVREDIERNERLLRRVLDTLRRKGVDERRIKDLERLIRESLKKAEEVLREAAEKSREIVDEIREVLKRADEALKRIIKKIRETRGKDALSRLLEELLRVVDDLIRVLKELIDKSRKVIEELLELLKRINEENLKVLAEIIK

SEQ ID NO: 13189 - protein, 235 aa, Artificial Sequence; identical to SEQ ID NO: 13188
  Synthetic

SEQ ID NO: 13190 - protein, 242 aa, Artificial Sequence
  Synthetic
SRKEKLLKESEEEVRRLRRTLEELLRKYREVLERLRKELREIEERVRDVVRRLKEVLDRKELDIDTIIKEVEDLLKTVLDRLRELLDKIRRLTKEAIEVVREIIERIVRHAERVKDELRKEGADKRKLDRVDRLIKENTRHLKEILDRIEDLVRRSEKKLRDIIREVRRLIEELRKKAEEIKKDPDERLVKTLIEDVERVIKRILELITRVAEDNERVLERIIRELTDNLERHLKIVREIVK

SEQ ID NO: 13191 - protein, 242 aa, Artificial Sequence; identical to SEQ ID NO: 13190
  Synthetic

SEQ ID NO: 13192 - protein, 234 aa, Artificial Sequence
  Synthetic
SEKEKLREIIKRHLRSVEEVLRLLAKILKDLTDASEENLRLLKELLRRLLEVIRKLVEDVKLDEKILRELEEDIRRLEEELDRLTKELRRKNREALERLRKLVEELRRKHERLERELKDIDKEDILRILADLSRKLKETVEEVLKYLRDHLKEDEDITRRVLDVLRKIVKKIEERARDEDALRKLKKKLEEIEKTVKDSIDKLRELLEELERRVRKIAEENKRLLEELVREVKK

SEQ ID NO: 13193 - protein, 234 aa, Artificial Sequence; identical to SEQ ID NO: 13192
  Synthetic

SEQ ID NO: 13194 - protein, 235 aa, Artificial Sequence
  Synthetic
KDEERLEDELRELTERMREKLKEHEERVRELSKEVKRKAEDSEEKLKKDLKEVEDTLRKKSEVDERALRLLRDILRKLIKLHRDVLERLKRILEELEKLDREVIEKHERSIKRLIEVTKRVRDRETARELLKRLLEDNRRALEEHKRELDKILKKLEEVLRDARRRHDDLLRELRENPVTEELLERIERIIRTSKKLLTEALEIIREIIKRSKDSNRDLHRDLEAILRRIEEAKK

SEQ ID NO: 13195 - protein, 235 aa, Artificial Sequence; identical to SEQ ID NO: 13194
  Synthetic

SEQ ID NO: 13196 - protein, 243 aa, Artificial Sequence
  Synthetic
SDEERLVAELERLIEISLRILEELLEVLRRLVEESLRLLEELVKVAEEIIERLLRLLEETVKDEDRLREIKEELRKLKEKIKRLVDEVREEHRDLLRKIEDLARRVRKKHKELKDKAKEVTKKVRGRERVLKRLSELVKELEDIHKDVLRELKELIDRLLTINKRVLERIDRLLKELLDLVRRDTGDSERLKKTADEIKKRLDKVRKDSDDLAEEIKRILKRVEDESRDTARKVKKVLEDAKR

SEQ ID NO: 13197 - protein, 243 aa, Artificial Sequence; identical to SEQ ID NO: 13196
  Synthetic

SEQ ID NO: 13198 - protein, 235 aa, Artificial Sequence
  Synthetic
SKEDEVLERLKRAIERSIKIVEEIVKRNVETNERSERILRELAETLRRVLDTIRKLLEDKVDEDTLREILERLRRELKELMDKSREELKRNEETLRKLEDESRKEIKTLRDLIKKRIEELEEVKRVVEELIRVHEKVLEDSKDSNRKSVKVHREALKAAEDLLRELDRVLEVATRGDISEEELKRRLEEIERKLKEVLDRLKKKHDDDNKENKDVLDEVRKRHKELLDKLREKRK

SEQ ID NO: 13199 - protein, 235 aa, Artificial Sequence; identical to SEQ ID NO: 13198
  Synthetic

SEQ ID NO: 13200 - protein, 236 aa, Artificial Sequence
  Synthetic
DEEEKVLRILEELLKEHKRVLEELLELVRRIIERHKEVLKRVLKLVEDLIRRIKEANREGRELVKKLEELLRELEEALKRSEDELRKILKELEDLIRKSLRDLERLLKELEDIIRENRDEKDLRRVITEVLKRVEKIHRRVLKEIKKVLKKLLDNHRKALEEIARVLKRLAEIVREANLPEEAAKEVEKRLEEVKTDLRRLARESEETLRRVEERLEELKERSERELKRVEEEIRR

SEQ ID NO: 13201 - protein, 236 aa, Artificial Sequence; identical to SEQ ID NO: 13200
  Synthetic

SEQ ID NO: 13202 - protein, 231 aa, Artificial Sequence
  Synthetic
SEEEELKRILDENHESLKDLLREIKEILRANHETVKKLLETIKEILDTVLKILRDVGLPEDVLRELEKLVRDIKRKLEEALKRHEEKLRRITKELEDMKRRHEEDLRRIREALKRGEIDKDAIADLLRKSLEIVRAILEKIKKVLEESHKTLRDIVRDIEKVLEDLLDMLREARVPEELLETLKRLIRELVKRLEKILDDDRKLIDRLVRRLEEILKEDKRRIEEALERLR

SEQ ID NO: 13203 - protein, 231 aa, Artificial Sequence; identical to SEQ ID NO: 13202
  Synthetic

SEQ ID NO: 13204 - protein, 244 aa, Artificial Sequence
  Synthetic
SELERAEELIKKLLKLHEDVLRRLTEVDDELLEIHDRVLKRLKEVDDELLKLIRDMLRRANISEDLVREVEERLKTLEKRSRDKKRENEKKLRELKKKSEKLRRESRKLLEELRKKVEELRNVDKKDVEKLIKEIVEVHRRMLEKWLRLNEEIAKVHEDSVRDWLKANEEIARTIEEILRRVLRGDEEAKDIREKLERLLRKSEELVRKSLKELKELLDKSKKLLEDSKRRLEEILKEIKDDSR

SEQ ID NO: 13205 - protein, 244 aa, Artificial Sequence; identical to SEQ ID NO: 13204
  Synthetic

SEQ ID NO: 13206 - protein, 237 aa, Artificial Sequence
  Synthetic
DEEDEVEKLIREAIELNKRILEEIKELIERIVRRNKEILREAKEAIERLIKIARDLTKDKSDEKTIEDVLREIRKRVKDLEDKLREANKRLKDDLDRLTRKLEDLHRRLKEKVDRTVEKDKDGQELKRVLDEILDVDRETIKELEDILREIHRIDKETIDRLLEILERILRALEEIAREKDEEKLERIARELKKLLEEVERRSRKAIEDLKRELKRVMDRSREAERKLRELLKETKR

SEQ ID NO: 13207 - protein, 237 aa, Artificial Sequence; identical to SEQ ID NO: 13206
  Synthetic

SEQ ID NO: 13208 - protein, 243 aa, Artificial Sequence
  Synthetic
SEDEVLKKIEDELREVEKKLEDVLREIKRRHDELKKRLDEKLERLRRRHEELKEALDRGEVDIETVRRVVEENVRTDKRILEEAKKVVEENARTDKKLNDEVRELLKRLVDKLRKTVRSDETKLRDLDRVLEKLKKDLKRVIEETRRVLEEVKEALDRILRESERVLREVEKRLEEIKRSPKREEEVKRDLKRILDRLLEVNTKSIEDLKRILDKLLEVNRRNVDEIRRILDELRKVIERVTK

SEQ ID NO: 13209 - protein, 243 aa, Artificial Sequence; identical to SEQ ID NO: 13208
  Synthetic

SEQ ID NO: 13210 - protein, 235 aa, Artificial Sequence
  Synthetic
DETERVKEVLDRSLKLNEDLLRKIDEILKRLFEINKEVIDIIRELLERLVRIAREVLEKNNVPEDKKRELEKILKDVEDELRKYEEELKKKLEDVERRLREYLKRLKETLDRAREILRDTGARREVVKKLIDDSLELVKRLLEEVADDIRESLKRLEDLLRRARRLAEELERLLRELNVREEVEKRIKKLLDDLEKVAREIRKKHKELLEELEKVAREVMDAHRRLLEDLKRTDD

SEQ ID NO: 13211 - protein, 235 aa, Artificial Sequence; identical to SEQ ID NO: 13210
  Synthetic

SEQ ID NO: 13212 - protein, 244 aa, Artificial Sequence
  Synthetic
SLKEIVKEIIDRASELLKRLLERSEDSLRTASELLRKILEDSRRSLRTIARLLEELLRTDGPEEELERAARRVKEELERLHKEIRDVIEEIKKTLKKLNEDLREAIERVKRELERLLKELEDSGVPRELLELVKRVVELMAELLDRLLKLNEKILRDIMKILDEILDLNREILRLVKEIIELIRRDGPDREIEKEIRRILEELKRKHDEIEKKIRELEREIKRKHEELEDRIRKIERDLDRRTK

SEQ ID NO: 13213 - protein, 244 aa, Artificial Sequence; identical to SEQ ID NO: 13212
  Synthetic

SEQ ID NO: 13214 - protein, 244 aa, Artificial Sequence
  Synthetic
SLRELVEKILRDAAKLIERLLKLSEEVLKRIEELLEELLRLSERSLRELLRLLEELLRSTGPEEELERLADRVRREIDKLNKEVRDALERVKEELKRLHDEVDKVIKEVKETLKELLKRLKEKGIPKDLLKLIEDVLRLVMTILDEIKELNERLLRLIEEIIDRLLELNNRLLEEIKRIIKRIRETGPDKDIKKELDDIVRDVKRKHDKLREELKKIVEDAERAHRDIDRKIREILKELKERTD

SEQ ID NO: 13215 - protein, 244 aa, Artificial Sequence; identical to SEQ ID NO: 13214
  Synthetic

SEQ ID NO: 13216 - protein, 241 aa, Artificial Sequence
  Synthetic
REEELRKKIEDELRDLKRKLEDLLRRYEEKLREAEKKLKDLLRRYEERVREIKKELSRNSDEEVVKEIIERLRRSNKELEEMIRELIKILEEASKELEDLVREILEAIRRILKELRDAGALKEKVERDAKKLLDDLRELLERILRESRRLIEELKELLKEVKRRSEELIRTLKEVLDRVKGEDELLRVLEKVIEDNLRIVEELIRRLEEVLKRHEDLVRTLLDLLKRVLEAVKKLLDEAVT

SEQ ID NO: 13217 - protein, 241 aa, Artificial Sequence; identical to SEQ ID NO: 13216
  Synthetic

SEQ ID NO: 13218 - protein, 242 aa, Artificial Sequence
  Synthetic
SSEELLKRIVDEDERVLEEWRRVLEEIKDLSKRVVDLLDKVLKEIEKIVDEVTRRLERDGTDDKKKIRDLVEEIKDIIRRAREKLRRIVKENEEILEEAKRRLDKIAEDNRRTLEKVRKELEETKEEREVKRILERVLREAEDSHRRAVELLEELLDRSRRTIEEAIRLIKELLDRILELLKRLGLPKDLLETIKKRVEEIRRTLEKIKRDYDKAIEEIRRKLERKLEEYKEVIDDLRRKTK

SEQ ID NO: 13219 - protein, 242 aa, Artificial Sequence; identical to SEQ ID NO: 13218
  Synthetic

SEQ ID NO: 13220 - protein, 234 aa, Artificial Sequence
  Synthetic
SSDELLEEIIKEIARLIEELLEILRENLERSEESLRRVLRAIDDNLRRVERLIEALARGEKREDDVVRDVDDSNKKLEDTLREVVKENEKSNEELKRRLEEVVERVRRLLTELRKREEDEKLEDVLRLVEELLRRLDEILKEHEEDNKRLLDLLRDIVRRHKEEVKRALEVARRKEEPKKAMDEELEKIRRDHERLKKEIEDRLRELKDKHRRAFEELKKMLDDIKRKVDEAKR

SEQ ID NO: 13221 - protein, 234 aa, Artificial Sequence; identical to SEQ ID NO: 13220
  Synthetic

SEQ ID NO: 13222 - protein, 247 aa, Artificial Sequence
  Synthetic
DEEEILREILRVAEELSRLNEEVNKRVLEVLERLSRMNEKLLKEVKDVVDRLIELRRRKDLRERELEEELRKLIEELERRLEELERAHRKLVDELRKLLETLKRRHEELARRLRKLLKDVVDEKKRELEEIKRIVEDIERALEESLRISEEIVRTILKALKESLDRIDRVVKEILRLLKELKDSDRDDKEVKRRIEKALRDIEELIERILRRNEEVKREIERLDEENRRRNKEALERIRRLIEETKR

SEQ ID NO: 13223 - protein, 247 aa, Artificial Sequence; identical to SEQ ID NO: 13222
  Synthetic

SEQ ID NO: 13224 - protein, 247 aa, Artificial Sequence
  Synthetic
KDEEELKRRVEKVIRDLERKLKDLEEDHRRVLEELKRELEETKRRLDKVIEEIERVLRRNEKPEDFALEEIRRLIEESIKTLRDLLRKLIKLNEDIARALKEIADEIRKLIEEIVKELRKKERDEDKLRKLEEDLKRLLDKVEKVLRDVEKELTDHNRDAKRAIRELEERYEEIEKEIERLRREVRGKERLIRVLEEILRLVLRLHEEVVRLVRRLLEESHRILRKIVELLREILEDLKKILDDIRR

SEQ ID NO: 13225 - protein, 247 aa, Artificial Sequence; identical to SEQ ID NO: 13224
  Synthetic

SEQ ID NO: 13226 - protein, 233 aa, Artificial Sequence
  Synthetic
DEEDEIRKRLKELLDDVKRRLDELRRESERLLKEVDDLLRESKKRLEDEKKKLEERGLSEEVKKVLKELERVHDENLKLIRDWLEKHVRINETLLKLIAELLKILEDVMDELTKDRTTKERVERLLRTLEEVLKEVADRIRKLSKKDKEDLDDILRRSKESNERLREVIKRLAEKGVDKEVLERLEKIVRRNEEVNDEVRELVTRLNETSNRAARELLELAKRIIEEIKKAVK

SEQ ID NO: 13227 - protein, 233 aa, Artificial Sequence; identical to SEQ ID NO: 13226
  Synthetic

SEQ ID NO: 13228 - protein, 235 aa, Artificial Sequence
  Synthetic
SKLETIKELLERLHELNERAVRELKKTLEDLHRDNARLIEELIRKNERLLEALREKVRDERLLTELTKLNEESIKRLEDILKKNRDLLERIKEDLDRLLKKNEELLRDIKRRLDETNSREEELIRVAEEVLRRDKKSHEELLKIAAEVIKRDKESHDELLKVHRENLELIERVLKESGLSEDADRDVKRLKEESEELLRRSKKRADDLKREVERLLEESRRRLDELLKELKDRSK

SEQ ID NO: 13229 - protein, 235 aa, Artificial Sequence; identical to SEQ ID NO: 13228
  Synthetic

SEQ ID NO: 13230 - protein, 245 aa, Artificial Sequence
  Synthetic
SRLEEIKKLLEKVMELIRRIAEELLRINEKVLEVLERIVRTILRLNEEHLKDVRDIARKLKLSDEILRRAEEIVKRSKEELKRLLEEAREIVKKSKRKLEELLKRIEEVVRDAKRKLDENKDSDERTLLEILKRILEELRKLIEELLRIHEESLRRIAKILERILRLNDKSLRDLERIVREAVRERNDDSTEIRKRLKELRDKNEELKKKVEEMIRRLEEESKKTKKRVEEILKRIEEEVREKAR

SEQ ID NO: 13231 - protein, 245 aa, Artificial Sequence; identical to SEQ ID NO: 13230
  Synthetic

SEQ ID NO: 13232 - protein, 237 aa, Artificial Sequence
  Synthetic
SREETLRERIERIKRKSEEDVERIKRTLDREREENEETVRRIKETVDRLREEVERELKDDKSLEEIIRRLTELLKKLLEVHEDALRRLDELVERVLRVHEEVLEELKRLLELLEAGLDRKDVRKRLKDILERVRRLHEKLKEELKRILDEYEKKLRELLKELKDILKDAEELLKSQPKSRELDRVEEIIRRIVKKLEEILRDLKRRAEDHIRRLTELIERSLKIVRDLAEDIRRAIE

SEQ ID NO: 13233 - protein, 237 aa, Artificial Sequence; identical to SEQ ID NO: 13232
  Synthetic

SEQ ID NO: 13234 - protein, 238 aa, Artificial Sequence
  Synthetic
DADELLRRLAEEVERVIREAEDLLRRWKETIKKVLDDLKRLLDELKKRNEDVIRELTKTKGDEELAKLIKDLLDTNEKVNRDLLRLIKKLLKDAERVNRRLLELIEELLEELKRVAKDLGLREEADKKLRDIADRARKELEDYERRLKELLKTVEDALRKAEEDSRKLKRDVEELLERGRLRKDDLEDILRKNLDRLRKLLERLREILRENLEALKKTLKRLEDVVREILEDLKRERK

SEQ ID NO: 13235 - protein, 238 aa, Artificial Sequence; identical to SEQ ID NO: 13234
  Synthetic

SEQ ID NO: 13236 - protein, 238 aa, Artificial Sequence
  Synthetic
TEKELLEELEEDVKRVIEELERLLREWKEELRRVLEESERLLRELRERNKRELEDIRRIKEDEALRERLKRLLETNDEVNKRHLKLIEELLRRIKEVNRRLLEEIRKLLEKLKEVLDRAGLDEEAKERLERILREVEADLRRYEKELEDLLDKVKKELERTREDSKRLVDEAKKLLEKNKLDLEEVTRILERNLKELERNLRDLDRTVKTNERLLRELLKKLRDIVRTILELLERKTK

SEQ ID NO: 13237 - protein, 238 aa, Artificial Sequence; identical to SEQ ID NO: 13236
  Synthetic

SEQ ID NO: 13238 - protein, 236 aa, Artificial Sequence
  Synthetic
SEKEDVRRKLEEDREKHERDLRRIEEELRRTIEESERRLKEVKKRLKELIDDVRRRDSDDRTLLEKIIRDVEKLVRELVEDNRRAIEKVKRLLEEIVKTHRDNIENVRRLLEEKGVPEEVREELRRIVEESERVVRRIEEELEKIVKDSEDAVREIEEDLERVLEKAKRLAEKLKDKEELKKAVETILEELVRIADKLIDIHREILEKLLRVAEKLLEVSRRALDKLKKLIDKTDK

SEQ ID NO: 13239 - protein, 236 aa, Artificial Sequence; identical to SEQ ID NO: 13238
  Synthetic

SEQ ID NO: 13240 - protein, 231 aa, Artificial Sequence
  Synthetic
DKAEVLREALKLLKDLLEELIKIHEESLKRILDLIDTLVKVHEDALRKLKELLERSGLDERELRKVERMATESLRTIRKLKEELRDLARRSLEKLREDLKRVDDTLRKVEEKVRRTGPSEELIEELIRTIEKLLKEIVRINEEVLKAVRELLKTLLKLSEDVVRRIEEILRKRNVPEEIDRELKRVVEELRRLHEEIKERLDDVARRSEEELRRIIKKLKEVVKEIRKKLK

SEQ ID NO: 13241 - protein, 231 aa, Artificial Sequence; identical to SEQ ID NO: 13240
  Synthetic

SEQ ID NO: 13242 - protein, 235 aa, Artificial Sequence
  Synthetic
REKEEIERTLEELKRILDELVKDDKKSLDRLREIMERSVRIAEETLRKLRETLELKARGEVDEDKLRELAKRLRDDLRRVSREHDEVRKRLKEEHDRLEKKIRDAERRLKTRLDELVKEKGRRIRELEEVLTEASRLLKEILDVNKEILDRAEELLRRNEKVIEEILRAVITLIRRDDDKDEVLKRLDDLIKEWRDVLEKLLRDLRELLERSKKRLRKVREDLKRLLEELERRAD

SEQ ID NO: 13243 - protein, 235 aa, Artificial Sequence; identical to SEQ ID NO: 13242
  Synthetic

SEQ ID NO: 13244 - protein, 236 aa, Artificial Sequence
  Synthetic
STREKAKKVLDTLRRDNEDMKRVVEKILRALKRTNERAEKLAREITEEIKRILKEVRVDRELLKEIEDTLKRVLEEIKRLLDESKKLLEDVEREIREILKTSEELLERIEREIETVNRDEKTLKEILKRLLELNEEMNRRLLKILRDLLRLNEEVIRRLLAVLERLLDALKEALDRGDVPEDLLRKLEEELRRIKEKLRKALEELEREHRELEKELDKLHDESRKEHERIEEELRR

SEQ ID NO: 13245 - protein, 236 aa, Artificial Sequence; identical to SEQ ID NO: 13244
  Synthetic

SEQ ID NO: 13246 - protein, 247 aa, Artificial Sequence
  Synthetic
DKERVLEDVKRRAKELEELLKEVEDRYEEDLRRIEETLKDTERRYREKLEKIKEELKRTVRRREVLEVIKELLKKLEDNIRELLDAIREALERLRRINKRILDILRRAIEEIKKILDEISRVDEKRELKKIKEEIDKLVDEIRRRLEELEKESEKVVKELEDKLRESVKRSEEIAKEVTDDLRRKNVDEKIKRIVEKIIKEHRDVLERLKRIIEEITRSDRESLERLKEILKELIRILKELADRERK

SEQ ID NO: 13247 - protein, 247 aa, Artificial Sequence; identical to SEQ ID NO: 13246
  Synthetic

SEQ ID NO: 13248 - protein, 242 aa, Artificial Sequence
  Synthetic
KSEDVVRELIKLHRELNDKARKVIETILERNRELVETAERVIRRLIKLLEDALRILKKSSTDEDEVRRAEELVRTLKEKAKRVLEEIRKLSKELEEKIRKVLEEINKLSEDLERKIEELTRKVRGEERLLEALTELLKDSIDILRTVLDLLRKLLETSLRILERVLELLKELLDDIREILRRLRLEEEELRRLEEEIRDIVRRLRKRVEEYRKELEDLEKELADEVKKYEDEVKRIREELRK

SEQ ID NO: 13249 - protein, 242 aa, Artificial Sequence; identical to SEQ ID NO: 13248
  Synthetic

SEQ ID NO: 13250 - protein, 234 aa, Artificial Sequence
  Synthetic
STEELLREIEEIIRRILEIADKTSKEWADLIKRILELIKRNLEELRKLVREVLEEVRKEGTSDRRVEEDLKRLLERYRRELEKLKEELKKVLDEHKKELKRLKDKLKRLLEELRKRVDDQDKTVLEEVLKEIADVVREITEVNKELARIIEELVKKIAKLSEEVLKTVEELIEELLEDKDTIDKLRKRLKEIKDRTKELLDRIREEIRELRERNKEIVKDIERRLRELKDRIRK

SEQ ID NO: 13251 - protein, 234 aa, Artificial Sequence; identical to SEQ ID NO: 13250
  Synthetic

SEQ ID NO: 13252 - protein, 243 aa, Artificial Sequence
  Synthetic
SKKELVREVVKELHELNKDVLRVLTEIVERVKELDKRVLEVLRRIVEEVERLAKEAGLDEDELRKLIEELRRLLKRIEDEVKRLNDELDKKLEELRKESEDLNRELEKTLRDDERKDSREDRVVRDIARILKTVLERNLRKIEEAARILMEYIERVKDLWRRAAELLKEILRRLLKLLKDKVTDKDRLREIEERVRKILEEIDKLLDDLRKAYDRILERIERLVRELSRKHKEVADKITELVK

SEQ ID NO: 13253 - protein, 243 aa, Artificial Sequence; identical to SEQ ID NO: 13252
  Synthetic

SEQ ID NO: 13254 - protein, 237 aa, Artificial Sequence
  Synthetic
SEDERVTRLKEELERLLDELRKRYEKLREEIRRVLEDLKKKYDELKEELDKMLRDLERRGKVSEEVLKVLRDVAARIEENLRRNLRLVAEIVRKLEELMKRNLDAIRELIEDVKRLLEIARRVKDERELKRIIEEIRKKIEKLLRESDKEVKDVDRDIKRALEESKKTNEKLLRDIERAGIDEELLRELERVSREDERLVKEAADELRRILDTDRKLLKEVVDTLERVLRRILKETR

SEQ ID NO: 13255 - protein, 237 aa, Artificial Sequence; identical to SEQ ID NO: 13254
  Synthetic

SEQ ID NO: 13256 - protein, 243 aa, Artificial Sequence
  Synthetic
SEEERVEELLRRIEKLLKESEEDVERLKKRHEEENRRLKEEVKRLMDELREILRRLEEETGEDRLVDILREIARRLEELLKRILELHDRSARILEELLERDLELLKEIVTEAKRVLEIIKRDGPTEEVKKELERLKKRVDEILKRSKDEVRKWKKAVEDAIRELRKLLKEVKDRVKELIERQRRDKDVDKLVEVLDRVLRRVRELLEELAETNRESIRRYERLSEKNAELVTEIIERLRRTVK

SEQ ID NO: 13257 - protein, 243 aa, Artificial Sequence; identical to SEQ ID NO: 13256
  Synthetic

SEQ ID NO: 13258 - protein, 247 aa, Artificial Sequence
  Synthetic
SKMEKLLKDLREALEKVKRRYEELERRLDEVLKEHEEIVKRLLEELEKVLKRIEEGGLPEEELEKLKKLAEKVKELLRELLRLSKELVDRVRELLKRDLDLVRRLVEIALKVLRERREQPNDEKRVEKIKRDLEKKARRVREENERIKRDLKRTADESRKRLEKLLEDLKRELDRLREDLDRARKDIDERVEELIERLIRIIERLLREVIKSHEKLVRTIERLIEESIRVNEELLEVIERLLDRARK

SEQ ID NO: 13259 - protein, 247 aa, Artificial Sequence; identical to SEQ ID NO: 13258
  Synthetic

SEQ ID NO: 13260 - protein, 243 aa, Artificial Sequence
  Synthetic
DLERVVEDIVDKAKRLLDKNLEVLKRIVDEVLRLLERLLRESRKVVKRVKEIIEELVRDEKELRRVKRALEEVLRRHEEIAKELKERLRKVAKEAEEKHKKLVEDLKRVVDEVRKKLSQPLDRKKVLEVLDELVTIIAKLLDENIKVLEEVIRVIAELLERLLDSHRRLIDIIAKLLEELRPEDKDLLTELEKKLRKLKRDSEKVVDDLKKELERIKREVKRLIEENRRTLKDIKRAVDEARK

SEQ ID NO: 13261 - protein, 243 aa, Artificial Sequence; identical to SEQ ID NO: 13260
  Synthetic

SEQ ID NO: 13262 - protein, 245 aa, Artificial Sequence
  Synthetic
DEDELVEEIERRLREIEKRLRDVMEESKRRLEEILRELKRIIDESRKRLDDLRRRLKDVSEEILRIVEEIIKINEDNLRNARRILEEIIRNNEDLLRKIEELLKEIIKIVRELLKLLKKDGTLDDRILKEVKERADRLRERLKRIEKKHKEDADKIREDLERDERKHEEDAKRIREELDRLRKDIDERIEKILEEILRLSRESLRKLKKILEELLKVSEDSLRDLIRILEDLLRLLKDLLEKLKK

SEQ ID NO: 13263 - protein, 245 aa, Artificial Sequence; identical to SEQ ID NO: 13262
  Synthetic

SEQ ID NO: 13264 - protein, 235 aa, Artificial Sequence
  Synthetic
SEDEELEDLKRKLRRALERYEDRLREIKRRLDEKLKEIKRDYDRLKKELDDLLREIERRGVKDELLERALELIKRLLDKSLRLIEEVLRELKRLLDTDLDILRRILEEVARLIDEVRSGSRPGEELVREIKKVLDKVKEDSERNVREIERVLEEVEKRSREIVREAEEVLKEVEDRIGRDEVVKELLDLVREIIKRLKEIHEEILRLIETVLEDLERANRRLLDLARKILEDARK

SEQ ID NO: 13265 - protein, 235 aa, Artificial Sequence; identical to SEQ ID NO: 13264
  Synthetic

SEQ ID NO: 13266 - protein, 242 aa, Artificial Sequence
  Synthetic
SKEEKLEDLIRRIKERLEEALRRNKKTADEIRKELKKATDRNRKRAKELRERLREVLRRTKEDKVIKELERVLEEVLRKLERSLEELRKLLDKILKKSEENAKEIKDVLDRILERLRKREEDEESMKRILEDLKRRLEEMAERSRKKIKDLEKEIEDILRRLEELHRKIKRELEELLKRITDETGPSEVVEELLRLLEELLEHNREVIEKLVDLIRELLRHDKEVTEEILRLIEELLKEVEK

SEQ ID NO: 13267 - protein, 242 aa, Artificial Sequence; identical to SEQ ID NO: 13266
  Synthetic

SEQ ID NO: 13268 - protein, 239 aa, Artificial Sequence
  Synthetic
SERELIERWLELHKEILRLIRELVERLLKLHREILDTIKKLIRELLELLEDIARKLNLDKEAKDELREIKKRVEDKLEKLERESRKVEEDLKRKLKELTDESDTVEKRVRDVVRRNTQRREEIAEELLRLDRKLLKAVEELLKEILDLNKKLLDDVRRILEETRRVLEKLLDRVRRRERTDDERRTLTELLKRMEDILEKVERTLKKLLDDSKRMAEEVKKTLKELLERSEKVAEDVRK

SEQ ID NO: 13269 - protein, 239 aa, Artificial Sequence; identical to SEQ ID NO: 13268
  Synthetic

SEQ ID NO: 13270 - protein, 233 aa, Artificial Sequence
  Synthetic
SEDELIRRIREELKRLEKEHEDMVRELEKKHKKLKEELDRAIEEIERRLRELKERVEREGNGLEVLKKVLDALRKLLEDLREILKRLVDANRELIKENHKILKKLVELLERLLKLLKDGVPREEIRKEIKKISDDIRRLHRDLERRSKKLDDDLKKELDEIKKRAEDLLRKLKEDGLDDELVKEIKRLLEELLRLLERLVRSSRRLNEELLRLSEKLIRDAERLARELLEAAR

SEQ ID NO: 13271 - protein, 233 aa, Artificial Sequence; identical to SEQ ID NO: 13270
  Synthetic

SEQ ID NO: 13272 - protein, 241 aa, Artificial Sequence
  Synthetic
KKEEDLRREVEEVKEEIRELIERSRESVRRILKEIKDLIRKSKESIDKILEDLKRKNLDETLIRAVEKLLRENLELLKKLLETVKELLERNEELLKRLVEEAERILEELLEVARRREDEKALERVVREVEKELKRLDDELKKALKDSEEELKRLEDELRRAKEENEKTLKKLRDDLRREGRDEEVLRVVEELLKLLKEHLEENVRILRRILELLRRHHDTNRKIVKRILELLRRVLESIRK

SEQ ID NO: 13273 - protein, 241 aa, Artificial Sequence; identical to SEQ ID NO: 13272
  Synthetic

SEQ ID NO: 13274 - protein, 241 aa, Artificial Sequence
  Synthetic
SVEEILRELLRVLEEILKRIADINEKLLRVSRKIVEDLKRLLDEALRVLRRAVEEIEKEGRDEKEKEKMRRVLEKLTKEVEDLKKKIEDVLRETEELSRRLKEELKDILRRLAKAVEDIERRRLDKEKVKKLLEDILREIERVIRESLRLAEEDVRKLEEIIKEILDLIERAIRIVEEEAGRDERLREILEELERVLEKVMRDLRRILREYEEVLKEAREEYRKILEELRKVLKEVDDRLR

SEQ ID NO: 13275 - protein, 241 aa, Artificial Sequence; identical to SEQ ID NO: 13274
  Synthetic

SEQ ID NO: 13276 - protein, 243 aa, Artificial Sequence
  Synthetic
SELEKIDRLLEKVLRENKRALDELVRLLEELIKTNRDALEKLREINERNIERLREEVKDVSERVKEELKRVAEESRRLIKKLKEDSEKTVRELRKLIEELRKRSKETIDRLRELIKRVREKGRRDKEAVKRLVDIHRRNLELLEDVVRKLLKLHEENLRLLEEAVRRILELDKKVLDKLRKDLDKKVLEDLERHLEESKKTVERLVRELRKTHRKVEEDVKRLIEELRRLHEELRKRLEDDDR

SEQ ID NO: 13277 - protein, 243 aa, Artificial Sequence; identical to SEQ ID NO: 13276
  Synthetic

SEQ ID NO: 13278 - protein, 243 aa, Artificial Sequence
  Synthetic
REKEELIKLIRDILEKLREHSRTIVELLETILRVVREHSKRIEKLLRELLDILRRQTLRDEELRKMLEDVERDIRESLKRLEELLRDIKRRIDESLRELEERLKELEKRIEELARRANKDITTAKRLLDVLKTLLKLNKESIERLLKVLEKLLKDDAESIKRLLDVIRELLKELKDVEEKRRPEKEVEDLLRKAVEDIEKLIRENEKLLEDVLRTIRKLIRENEELLRDIVEKIKRLADEARK

SEQ ID NO: 13279 - protein, 243 aa, Artificial Sequence; identical to SEQ ID NO: 13278
  Synthetic

SEQ ID NO: 13280 - protein, 247 aa, Artificial Sequence
  Synthetic
SEEEEVKKVVDEIKKVLDELRKANEDSARRLREVLEELRKRNEESKKEVKDLLEELKRVKRDEELRRVAETLLDVNRRNLEINVKVLRELIRISEDNLRINDEVAKRILDLVRELLKELEKAGLSREEIEKRLRDLEKKVKELKERATKLHKELDDALKETKKRVKKMHDDVRKKVKELRELSKDKDTDTKVKELIEIVDELLEIDDRILEEIERTVRKVIDLNRKVLEDIEELVKEAIKVLEEIAK

SEQ ID NO: 13281 - protein, 247 aa, Artificial Sequence; identical to SEQ ID NO: 13280
  Synthetic

SEQ ID NO: 13282 - protein, 233 aa, Artificial Sequence
  Synthetic
DEEEELRELKERIERTIEKLKEDTKKLKKELEDRIRELKRKTKELLDDMKRLIKEVKDKGDRDEALEELAKVSEDNLRINDEVLEELVELAKRLLKLNVDVLDELRRLVEEILKARKDGKDRSDLERVVKELREILDKLRKDNERVVKRLKEVLDELRRRNEESVRRLEEILRDRNLNEDIIRLVRDLIRLNREHLRDLEEAVREIIKLLREHLERLERVVDRMIRELRKAAK

SEQ ID NO: 13283 - protein, 233 aa, Artificial Sequence; identical to SEQ ID NO: 13282
  Synthetic

SEQ ID NO: 13284 - protein, 241 aa, Artificial Sequence
  Synthetic
SEEEELDKLRRELEELAKESTREVKELLRELREMLERHKKRLKEIKDKLDEDIKREDSKKDMVEEAVKVLRDILRRHKEVVEELAKVLEKIAEILERLHRRNLKLNREILKRLRDDPRGERLREELDRLVRRLEESNDEIRKALEDLVRELRELLKRIEDDHRELARRLEELLKRIIDRDGRTDELERLKDLLRTLIKKLEDLLENLRRLVERVIESLRRLVEKDEEINKRTIKELRRAIE

SEQ ID NO: 13285 - protein, 241 aa, Artificial Sequence; identical to SEQ ID NO: 13284
  Synthetic

SEQ ID NO: 13286 - protein, 243 aa, Artificial Sequence
  Synthetic
DEERIVDKILKVIRESAEALRKIVEDVLRVLEELMRRHKKNVEELDTIVEDLLRKVRERVDKDELERLKREKEKDRERVREIVDKYRKVLEELKERLERVLEDYRRKLKEVEKKVKEIRDRKDEKDEKTVVDEIRKLVEELLTLDRKVLEDLRRLAEEALRKDREVSELLRDLLRRIEEKLTSTRVEEEVLREARRRIREVERHNKKVHDDARKRLRDLVEELKRLHRELEEKLRRIIEEIDR

SEQ ID NO: 13287 - protein, 243 aa, Artificial Sequence; identical to SEQ ID NO: 13286
  Synthetic

SEQ ID NO: 13288 - protein, 242 aa, Artificial Sequence
  Synthetic
SEDEKVRKLLRDLAEEIKRLLETYDRKLKEIAKRIEDTLREYRERLEELKRRLEELVRKKNKDMTVIEEIDKLVRETLRRLEEIIDRILKLVKENAKLLEDIARRILDLIKKLLEILEEGRDRKEVRKAVEDVLRDVEKKLKDLLKHTEDSVTRVERLLKELKDRTKKILDDIKRRLDEEAKVEELVREIRRTLETILRLNEELLKRIRDVLREIIELNREVIERLREILERLADLIRRRAE

SEQ ID NO: 13289 - protein, 242 aa, Artificial Sequence; identical to SEQ ID NO: 13288
  Synthetic

SEQ ID NO: 13290 - protein, 245 aa, Artificial Sequence
  Synthetic
SELEKLARLLEEILELLRELHRKTAEALKEILELLDRHLDDLRRAVKEILEDLDKDLEDERRRELEEKVERVKETLKELLERLRKRNEDVKRELERILRENEKRLEDVKKTLEDVLRRLADLVRRGKGEEELKRVLEELLKLVKEVLDVNRRSVERLLELARRLIEENEKVLRELLELVRRVLEELLRDDDKAKKVREKLEELLRRLKEKNDDLRRKLERLARELEKLHEEVKKRLKELEDEARR

SEQ ID NO: 13291 - protein, 245 aa, Artificial Sequence; identical to SEQ ID NO: 13290
  Synthetic

SEQ ID NO: 13292 - protein, 245 aa, Artificial Sequence
  Synthetic
RELEKLAEVLERIVRALETHLKLIADVLREILRLLDEHLKIIKKVVRDILRELDEVLRRRDDETLERTLERMKRRLEEVLDRLEKENERVKKELRERLERLARENEEVIERLKKLLDELRKARENGKDESVLRRVLEEVLRLVKELIDRNREVLEELLKLAETLLRINTDVLRKLLELVEEILRRLVDDSDTLEKLRRRLEDRRRKLKEANDRVREVLDRLRKELEEIDKRLEDVLKKLREDLER

SEQ ID NO: 13293 - protein, 245 aa, Artificial Sequence; identical to SEQ ID NO: 13292
  Synthetic

SEQ ID NO: 13294 - protein, 241 aa, Artificial Sequence
  Synthetic
SKKELLEEVVRRAIELLKRHLEKLKRILEEIVRLLEEHLEKVERVLEAILRLLDDLLRRVTDERLIRTLEDVKRRLREILERLADENRKAIKRLRDLLDKLEKRNKEAIERLEEILEELKRVRRDEELLRVLETLLKIIEDILRENTKVLEDLLRLVEEILERNLRVVEELLRLAREILTEIVTDKDKLKEIEDELRRLLEELRRLDKKIKDRLRELKKDLDEANRRIKETLKKLLREVEK

SEQ ID NO: 13295 - protein, 241 aa, Artificial Sequence; identical to SEQ ID NO: 13294
  Synthetic

SEQ ID NO: 13296 - protein, 238 aa, Artificial Sequence
  Synthetic
SDLEELEKLIRRLLKINEDLIRIIEDLIRKSLTLLKRIVDLIRELIREIEEIIRRTNIPKELVDEAREKIKRILDEVERLLRELKKRHREILEELRKNLERVRRELKKILDRLRDLKRKNAREEEIRKLIEELLKVHKESLDSIRRLIEKLLRVHETALRRLAELIRRLLEVLKEVLDKVPVSEEIRKRVRDLEEKVKKLLRDLEEESRRVAEKVEEDLKRVEEESRRTAREVEEKER

SEQ ID NO: 13297 - protein, 238 aa, Artificial Sequence; identical to SEQ ID NO: 13296
  Synthetic

SEQ ID NO: 13298 - protein, 244 aa, Artificial Sequence
  Synthetic
SKEERADELLKDLERKVDKLRREHEELLKELKRKVDELRKEHKKLLDTLREEVRRIEEKVKEEEELRKVIRELLELLERNVKKNIDVIETLLRLLEDLVRVNVKVLKEIVDELKKIVEAIKRGEDRSEVDRAIKRLEDILEKLARENKRVMDELRKLLRTLREENKRSIRALEELLERLRRRVKSEDVLREITRLLEKAKRIIEESLREITELVKEIEKIIKESLDAARRLLEEIKKILEELAR

SEQ ID NO: 13299 - protein, 244 aa, Artificial Sequence; identical to SEQ ID NO: 13298
  Synthetic

SEQ ID NO: 13300 - protein, 241 aa, Artificial Sequence
  Synthetic
SIEELARKLVKENRRLATEANKILKDIVKTNRDSIRKVREILKELVERLRDLIRKVRRDGDDDERKLEEIVRELEKRLEEIKRKLDKVVKESEDLIKEIEDKIRELDKRSEDKLREIEERLKDSGRESVEKVLTELLKVHEDHLRELIKVLDELLRLNDESVRKLKELVEELLRVAEDVVRKIKVDEDLKRELERAKRELERLLRELDEEHERMKKKVKDEIRRLKKESEEVKKEVKDTED

SEQ ID NO: 13301 - protein, 241 aa, Artificial Sequence; identical to SEQ ID NO: 13300
  Synthetic

SEQ ID NO: 13302 - protein, 239 aa, Artificial Sequence
  Synthetic
DEEEITRKLEETIRRLEEEIDKIIKDLLRMLEENNKEIKKVIEKVLETSRRILSALARNVSEEELDRILKEYKELLDRLRERSEELKKEDERLVRDIRRTLKELLDRLKELVDRLIEERGRTKLVELIDKLLKVLEEALREIKRVIDELNTVNRDANRRILEVLDKNLELVKRIIDLAKERRTEEVLREAEKRIRDSAEEVKRILEEHKERLRELVKKLERVKETVRKKIEELREEAKR

SEQ ID NO: 13303 - protein, 239 aa, Artificial Sequence; identical to SEQ ID NO: 13302
  Synthetic

SEQ ID NO: 13304 - protein, 232 aa, Artificial Sequence
  Synthetic
SELEKDLKDAEEIIKELEEINKRLLEEIRRIVERITKINRDLLETVKRLIEELIKEDSVDEKVVREIEEELRRIKEESKKVEKDIRELLRRITKKSEEVAKRLRELLEELRRANKPKDDLLREILEVLETALRMLEESLKELRRVLEELLKASKRTLEKVKEVLKRLLEKARKGVDEERLKEIEERIRRTEEDVKRKHDDVRRELDEEDDRYKRELDKVRKKLKEKADRIRD

SEQ ID NO: 13305 - protein, 232 aa, Artificial Sequence; identical to SEQ ID NO: 13304
  Synthetic

SEQ ID NO: 13306 - protein, 232 aa, Artificial Sequence
  Synthetic
SKLEDLLRKVEEIIKEIERINEELLKRVAEIVETLLRENKKLLEEIKEILKRLIEDGSVDEEVVRKLEREVTEIEKKSKKVADDIRRKLRKLIEESREVVRDIKRKLEELKRANKPKDDLLRDILRVIKRLLERSAEIVKRVEDVLEELLKLLKETLDELLEVLKRVLDEVRKNVDERKLDKIRKDLERVVREYEEKLKEVRKRLRELVERVKEKHKRIEEELRKTAKEVRD

SEQ ID NO: 13307 - protein, 232 aa, Artificial Sequence; identical to SEQ ID NO: 13306
  Synthetic

SEQ ID NO: 13308 - protein, 242 aa, Artificial Sequence
  Synthetic
SSKELVEKLKELIKDHLRVADEVIKKLEELIRRHLRKVEEIARRLEELIRELADELRRAGIDEKELDKIRKEIEKVLRELKRLLEELRRDHERVLKELEREVKRLRDDHRRILKELDDLLRRGLDKKELLERVRELAERLNKLVEDILRRVEELLRELSKKVKELLKRVERLLREILKLIRDAGGDRRRLDRLEEKVEKDLRKLARELEDVNRRLEEELRRLEKRSEDLNRRIREEIKKDAK

SEQ ID NO: 13309 - protein, 242 aa, Artificial Sequence; identical to SEQ ID NO: 13308
  Synthetic

SEQ ID NO: 13310 - protein, 238 aa, Artificial Sequence
  Synthetic
KDDEILRKLLEILERLLKLSEEVLRELLRLLEELLRLSKESLKRLSRLLEEALKTLVEEEGREDETLERLERELRRVERKYKEDLDDILRKAKRLLEEAERLHREIRDRLRKAAEKKDEGDRDELIRRIIRLVRELTKINDELLKRVEDILRELAKLNEELIRTIKELLDRLVEKLVRRERLKAVVDRIEKAIKKVTEDSRRLVKRIETELRELVKRSKDLAREVEKRLKEVVEEAKR

SEQ ID NO: 13311 - protein, 238 aa, Artificial Sequence; identical to SEQ ID NO: 13310
  Synthetic

SEQ ID NO: 13312 - protein, 242 aa, Artificial Sequence
  Synthetic
SDLERILDKVTKLAEDAKKLAKKSVDLHRDNIRRLKTTLKRILESLRKAIKRLKDALRRGPRSERVDTLIRRIDKLIKELEDEVREIERRIDELSRRLEEKYKEVIKRIDKLVKDLRDLARRGVDRKDLVREILRILREIIETLRRLDEEVLKVNEEILDLIEELVRSILKVLEEILRLLVEETGPSEELEELKRDLDRLFEKIRTDLKRLRDTNRKLFDDLRKEHEAVEDKVRRVAEELTK

SEQ ID NO: 13313 - protein, 242 aa, Artificial Sequence; identical to SEQ ID NO: 13312
  Synthetic

SEQ ID NO: 13314 - protein, 232 aa, Artificial Sequence
  Synthetic
SEEDLVREVLRAIKRILELLTTLSKENLEVVKRIIEDLERVARENLRVIEEIIKKINVDEEMKKELDKELKRLEDEHRKAIRELEELLEEHKRRLEEIRRRVDKELEDIKRANLPIEDLLKVIDDVVRKLLRLVKEDLESLRRIVRKLEELLKKNLKLLRDVLRKLEDIARKKNVDERIIEEIRRTATEVLKRNEAVVKKIRELIKRVTERNRKVLEEIKELVKRIKDELRR

SEQ ID NO: 13315 - protein, 232 aa, Artificial Sequence; identical to SEQ ID NO: 13314
  Synthetic

SEQ ID NO: 13316 - protein, 237 aa, Artificial Sequence
  Synthetic
DKEREIDDIAEKLRRKYKKLREDLDRIEEELRERYERLKRKLDELARRLTKKARDENSDKKAVEELEKMIKELLDRLRKLIEDNLRVVEEIIKLIRELIDRDVEVVEELLDILKKVRTEEMVERIERRIEELLKETERLLKEVLDRAKKLHRDSEELVERVERRIKELTDEIKRLIEENKVDERLEELLKEVVETLRRLLEELKRLSEEVLKKAKEVIDRIRRLSEEVVKSLRDAAK

SEQ ID NO: 13317 - protein, 237 aa, Artificial Sequence; identical to SEQ ID NO: 13316
  Synthetic

SEQ ID NO: 13318 - protein, 242 aa, Artificial Sequence
  Synthetic
SEEEELDKLLKEYERVVREIEEKLDRVKRDIERLVEEITRDLRRVLEEYRKVVEELAKDEGDTSEILDTDMKIVEDLLRLLKEILDKILKLIEDALRVLKEVLKRDTDIVRRIIEILRRGVSEKDLKEILDRWEEENKKLLEEIKKILDKVRDDVRKLVEEVRKALEDWKRTLEDLLRKEGQESDTARRIERLSREVIKKLEKALKELEDLVREVLRRLKEAVEEIHKLSRDVIKMLTDATR

SEQ ID NO: 13319 - protein, 242 aa, Artificial Sequence; identical to SEQ ID NO: 13318
  Synthetic

SEQ ID NO: 13320 - protein, 246 aa, Artificial Sequence
  Synthetic
DDEERLKKVKEEIEEKAKRLKEDLERALKRYEDIIKKLEDDNRKVLERIRRKVEELKKNRVTSKDIEKALREIIEEIKRLNRENVKEIRRLNEEVKELLDRILRALEEIIREITDLLDKSVKDEEKLRKIKEKLEKVLREIEKDVRDLKRKHDELLKRVDDISRKIEEDLDRVAEKIRRILSKPVDDELIRKALEELLRIAEEILRRDLRLLEENRRVVKESLDVLAELLERLLELLERILREVRK

SEQ ID NO: 13321 - protein, 246 aa, Artificial Sequence; identical to SEQ ID NO: 13320
  Synthetic

SEQ ID NO: 13322 - protein, 234 aa, Artificial Sequence
  Synthetic
SERDVLRELLERIKKLLETLIRIVEELVRRSEETIKRLAELNRRLIEEIRRIVEEVKKDVEEEILRDVERLLKELADETEKILREVKKRLDDNLKRLEEIVRDVERLLKELKEEVDRGDKSKEELVREILKVAEEILRKIEELVKHHLDLNRDILRLFTESAEKLEEILREVLRKLRLDEEVKKRVEELRREYRETLKRLRDESEKIAEELKRLLDELRRRLEELARELRERTK

SEQ ID NO: 13323 - protein, 234 aa, Artificial Sequence; identical to SEQ ID NO: 13322
  Synthetic

SEQ ID NO: 13324 - protein, 235 aa, Artificial Sequence
  Synthetic
TEEEIIKEIVKLLRDLARLHEEVDRTNKRLLDELVRLHREVDERLTRLAEDLIRLAEKGASDDEIRELLKRIADELERLKKELEEINKRHRDEVERLKEELRRLNEEIKRRVEELKKDLREEAVRILEEILEMLRRISEKNLRVNDKIHETIERISRTNLKVLDDILRALEELAKAKLDRKDLRKVVEELRRRIEELNRRHDKLAEDLRREIEELNKEHKRMLRELEKKIEDDRR

SEQ ID NO: 13325 - protein, 235 aa, Artificial Sequence; identical to SEQ ID NO: 13324
  Synthetic

SEQ ID NO: 13326 - protein, 240 aa, Artificial Sequence
  Synthetic
DAEEILKEIHEIDKRTIDEIRKILKKLLEADKKSIDDIRRILKKLLEIVKRLIDLLRRVRRDEEVKEVVKEVERRLRELREEVKRVVKDSEDKVKRLREDMDRVVEESERLARELREKLKKKRVPEDVLRLVEEIIKLNREVLKEVRELLEDIVRVNREVLREARELLEELARTLRKLLRDRSDDKTLKKILDELRRKVKETDDRLRKLHEDLKRKVKELIDRLERLNEDIARLLKETRD

SEQ ID NO: 13327 - protein, 240 aa, Artificial Sequence; identical to SEQ ID NO: 13326
  Synthetic

SEQ ID NO: 13328 - protein, 236 aa, Artificial Sequence
  Synthetic
KTEELLRELIKVLKETLDRLKRVLEKLAETNDKSLKELLKLLEELLKAIRDVLRRILDDKDVMRDVERRLREILERLREEIDRYREELKRLLDEVKKTLDEYEKRVREVLEEIKKRGLTDELIRKLAKENEELVREIERIIKENRDANEELLRRALEILKRLLDLLKRVLEEVVARRGRRVDEVVEELEKVARELADKLRRVLKESEDVVKRVKDELREVLDRSKKVLEELKKKRK

SEQ ID NO: 13329 - protein, 236 aa, Artificial Sequence; identical to SEQ ID NO: 13328
  Synthetic

SEQ ID NO: 13330 - protein, 241 aa, Artificial Sequence
  Synthetic
SKEELVKEIDELNKRVNDLLEELLRKSEKLHKEILELLERLLREIIKLLRRILEIVERRLEDETLKRVLEKLEETLRRLKKKVDEELKRLEDENRRLKEEMDRLLRKSREELERLREKVVRDRGREDEVLRRLLELHTEDLKHAREVLDEVLRLNKKALDLIRRILTEVLKLIKELLKLIEAGADEDELRRLLEDIERKIERLLRELKKESEEIRKRIRELLEDNRDKSRKIKKAIEELKK

SEQ ID NO: 13331 - protein, 241 aa, Artificial Sequence; identical to SEQ ID NO: 13330
  Synthetic

SEQ ID NO: 13332 - protein, 235 aa, Artificial Sequence
  Synthetic
KLEDAARIAAKAAEEWAEAHKRAAKINAEASEEWAKAHREAAKIAAEAAKRAADEARGDKDEDAKRAEDLARRAIEILEESAKRAKDAAEDDKRIAKESAERAERLARKAKELLKDLAKKKASADDAARLAKRVAEEAKRLDKEAADLSRDSARRAKELDKRALKLVRDAAREAKKAVDDEDALRVIEKAAEDAERAAKESLDVAERALRESEKAAKESLEVLERALRDAKRAAD

SEQ ID NO: 13333 - protein, 235 aa, Artificial Sequence; identical to SEQ ID NO: 13332
  Synthetic

SEQ ID NO: 13334 - protein, 242 aa, Artificial Sequence
  Synthetic
SALETAAKLAKEAADRWLEASKRAAELAKDAADKWLDASRRAAELAKKAAKEALDADKEDALERAARSLEEAAKEAIKLDEEAARRLAEAAKTAIKLDEDAARDLKRAADEAKRRLTEDRDAAREAEKLAKRAADAAKRHTDELRKLAERALRASKEHTEDLKKLADDALKAAEELKRLDDRDTDLKRRAAKAAEDIKKAADELLKKSEDAAREIKEAADKLLEDSKRAAEEIKRAADEITR

SEQ ID NO: 13335 - protein, 242 aa, Artificial Sequence; identical to SEQ ID NO: 13334
  Synthetic

SEQ ID NO: 13336 - protein, 238 aa, Artificial Sequence
  Synthetic
DEAEKLAKEAREAIKRYADASEKIAKEAREAIKKYLEASKRIAKELREALKELARRLTDRRALEAAKKAAKVVDDAAKKNEDAARRAAEVIDKAAEDNRRAAEEAARVIDEAADRARRISDKDTAAEVAARAAREAARIIEEASRISAEAAEEAAKILEDASRIAAEAAKRAADIAREALRDKDAVREADEAAERAREKLERLSREAKKAAKDAKDKLKRLSDEAKKVARRLIEELKR

SEQ ID NO: 13337 - protein, 238 aa, Artificial Sequence; identical to SEQ ID NO: 13336
  Synthetic

SEQ ID NO: 13338 - protein, 232 aa, Artificial Sequence
  Synthetic
SKDEKAIEALKRAADETRKAAEKSADAARRAAEKSEKAAREAAEALKRAVEEAARALGEENEAAREAKKAAEEAAKTIKEALERSKKAAKELIEENRKIAKRSERAARELARLLREKKEDSKEIVKKAEKAAKELEELWRRTSEEARRAAEELEKIWRELLKRLRDAAREAARRGVPEAVLRAAEKAIKAAEEAARANKKAADEAIRANEEAAEANKRAADKAIKAIRDAAR

SEQ ID NO: 13339 - protein, 232 aa, Artificial Sequence; identical to SEQ ID NO: 13338
  Synthetic

SEQ ID NO: 13340 - protein, 233 aa, Artificial Sequence
  Synthetic
DREDAARRVEKAAREIAEKNKKAARDIKELAKEAIKRTKEAAERVKRAAKRIAEAAEEGADEKTLLEEAKELAERAKRASEDLARKWEKIARDALRALEESARDVRRLAKEAKDALRRDGGIREAAEAIDRAVRKAEKTHKEAAEAIKRALEDARKANEDAARAIDDALRKLAEARDKDAVKRALEELARAAEEAARADAEAAKKLAEAAERAARANIKALRDLAKAAKDAAR

SEQ ID NO: 13341 - protein, 233 aa, Artificial Sequence; identical to SEQ ID NO: 13340
  Synthetic

SEQ ID NO: 13342 - protein, 245 aa, Artificial Sequence
  Synthetic
REEEAAREAAEAARRAAEIAIKANEEAARAAKRAAEISIKASEDAARAAEEAAKEAARSNDKNERAKKAADEVKREAERLAKENRDIARRVEEEARRILDESRRIAEEVKRRAEEILKLLRNGEPLEELAKRLIEILKRALEEDHRLARRAIDILRRALERNARLAREAIEILKKALEDAAREAQDEDALRRAKKAIEDAIKVLKEALDKSAKAIEEAIRVAKEANERSAKAIKDAIEVAERAAR

SEQ ID NO: 13343 - protein, 245 aa, Artificial Sequence; identical to SEQ ID NO: 13342
  Synthetic

SEQ ID NO: 13344 - protein, 243 aa, Artificial Sequence
  Synthetic
SEAETLVERLKRLSERDERAARRLVEELKRLAEEDKRAAEELARRLEELARRAEDVARANKDRDEAKKVVEDLEKEAEEIIRDYRRLLEELDREAEKVIEDYRRILDKLRRDAERVIEDAKRRLKDLEEAARAIKLAREAAKRAIDASKESADAAERAAKEAIKASKRSAELAEEAAREAIKALKDAAEEAAKRLRRAAEEALKINKRANEELERAAREALDLNRRANEDLEKAAEDALRTAK

SEQ ID NO: 13345 - protein, 243 aa, Artificial Sequence; identical to SEQ ID NO: 13344
  Synthetic

SEQ ID NO: 13346 - protein, 243 aa, Artificial Sequence
  Synthetic
REAEELVKRLKELAEKDRRAAKRLVEEAEKIIRRARELSKKTVKKLEDLIERAKRLADANKDRDEAKKAVEDLDKEAKEIADEHRKATDKIERDARELIKKYREILKRLEEEAKRVIDDARRRLKELEEAARAIELAEKAAREAIEASRRSAELLREAAEKAIRADREAAKLAEKAAKDLIRALKDAAEDAARRAEEAARRALKINEDAAREAERAAREALKINDEANKRLEEAARRALETAR

SEQ ID NO: 13347 - protein, 243 aa, Artificial Sequence; identical to SEQ ID NO: 13346
  Synthetic

SEQ ID NO: 13348 - protein, 240 aa, Artificial Sequence
  Synthetic
KELEEILKTVEDLVRRAKELLRRIHEINRESIEDIRRLLKEIHDTNKRSIEKVDELLKRKTSEETLERLVEEHKKLLEDLLRRLRRLVEEHEKKLDKLRKTIEKLVREVEELLRRAAERVDDERARRVLKEVLRVIREVVEILKRALELSLEVLRDVVRRIEEALRLSLEVLKRVVEVAKNKRDETEIRKILKESNDRLTEVIKEVEKVLRESDELLRDALKKIVDVLREVLKRLEDTVR

SEQ ID NO: 13349 - protein, 240 aa, Artificial Sequence; identical to SEQ ID NO: 13348
  Synthetic

SEQ ID NO: 13350 - protein, 247 aa, Artificial Sequence
  Synthetic
EKEKEIKDAEDEARKAAEESKRKIDKADEDAKKALEELERSIREADKDAKRALDEERREDRRAEEAIKKLRDLARRAKKIHRDNLEKIDEIARRLKKLIKEYIEKSEKIARELKKLIEDAARKERGSDALRLAKEALDLVDEAARRNEKAAREALETVDRAARRAKEAIKKSAEDVDRAAREAEKLARERREDAARIAAKAAKDALKANEEAARILARAAKEALKILEDATRILKEAADRALDILRK

SEQ ID NO: 13351 - protein, 247 aa, Artificial Sequence; identical to SEQ ID NO: 13350
  Synthetic

SEQ ID NO: 13352 - protein, 246 aa, Artificial Sequence
  Synthetic
SEVEEIEKVARRNLELIKRLLEKAERVAKKSLDLIKKAADDARRIAEETLKLIREAAEAGVEEKAAREALRAIEEAARRAEEAAKEALKANKEAADRAREAAKRALDATRKALEEARRLAKDRAEEAAEALARALKRTIEAAKEAVEALARAAKRSADAADRAVEALARALEEAIRAAKEASRTKEAEDLLREAAKRAEELIRRAEEAAKRLKEEWERLIRELKRALEEYAKEAKKLIKELEDRTR

SEQ ID NO: 13353 - protein, 246 aa, Artificial Sequence; identical to SEQ ID NO: 13352
  Synthetic

SEQ ID NO: 13354 - protein, 245 aa, Artificial Sequence
  Synthetic
SKREEAEKAARRAEKLAREAREAARRSLERAKDLARRHEKLSRELLEEAKRLAEEVKETAKKPTDERTAEELARKIIEALKKANEENRRSAEELIEALERNLREIEKLIRDAIEALRRAVEEARGEGKRKADELRRAAREAIEALKRALEEARKAHEEAIRAIEEALKKDSKAAKEAIDAVDEAAKRKAIDEALKALKRAADLSADANRRALEALEKAARLSARAAEEALEALRRAAELARRAAE

SEQ ID NO: 13355 - protein, 245 aa, Artificial Sequence; identical to SEQ ID NO: 13354
  Synthetic

SEQ ID NO: 13356 - protein, 237 aa, Artificial Sequence
  Synthetic
SAEDIIRESEKADKDALDEWRRLIKKLEDLIEELLKENERLIRKLEELIKKALEADKEERGSEEAKRLLEKLARAIEELEKEARDLNRRAAEAIKRLADEAKKIVEEYKKIIEEIKKKASDARDLARALDRSAEAHERAAEIAARAAKRALEAHSEAIKIAIRAAKEALDAARAAKRGEARGEEAAERAKRAADEAKKASDEAAKEAREAAERALRAAEEAAKEAEKANRDALRSAK

SEQ ID NO: 13357 - protein, 237 aa, Artificial Sequence; identical to SEQ ID NO: 13356
  Synthetic

SEQ ID NO: 13358 - protein, 251 aa, Artificial Sequence
  Synthetic
SEDEELAKEAKRAVEEAKKRLEDLLRRAEEAHRRAKKELDELARRAEEAHKKAKRDIDRDAKDDEAARALKEALDRHLEAVKKAAKALKEALDRNLDAVREAVEAAKKALDDALKAIEDASRRDRKEDAKRAAEEAAKALEEAAERAERAAEKATRALEEALKRAREASKEAAKALKEALKRARESNVEEEIVRRADELAKRAEELNRRLAEEADKIAKKAKDLNERLLREARDIARRAKELIKRLLDARR

SEQ ID NO: 13359 - protein, 251 aa, Artificial Sequence; identical to SEQ ID NO: 13358
  Synthetic

SEQ ID NO: 13360 - protein, 241 aa, Artificial Sequence
  Synthetic
SKAERVVDEARKTDEEVLREAEKVNRKVEEVIRRVLKRNEDVNREIARAIERVLRGGVEEKLVRELEKLNRDHHEKSKENIRNLEEVNKKHHEELKELADRNRRLNDKVLEDAKRDRREEEVRKLLEELKERSRDSIRKSRELLDRLREYLKRDIDRSEKVLRELEKRLRELIEKVRRKVDKEEVLRTAEEVVREALRLVTDAHRVNEEVIRDVLRLVERVHRVYEEVNRRNDELLKELTD

SEQ ID NO: 13361 - protein, 241 aa, Artificial Sequence; identical to SEQ ID NO: 13360
  Synthetic

SEQ ID NO: 13362 - protein, 232 aa, Artificial Sequence
  Synthetic
KDEERLREILKKYKEDSERILREVREILERYRRAIEEILKRLEDILRKLEEDVRRELKDNEAVKRVVEKALEAVKEVLKAIEDAVRESLKAAEDVLREIKRVSDAIIRVLEALARGERDVDEVLETARRLTEEVEKVVREVLERSERALRKVRTVVKRVLDIIRELLAEVKRAVPDLTKALKTVRDVLELLRKILEEVRRLNEKLLEELKRLLDEVVEKNERLIKLLEKDAE

SEQ ID NO: 13363 - protein, 232 aa, Artificial Sequence; identical to SEQ ID NO: 13362
  Synthetic

SEQ ID NO: 13364 - protein, 240 aa, Artificial Sequence
  Synthetic
DELETLEDVLRKIEDLLRRWLEKLEETLKRIIRLLETSLKLLEESIRRILRILERDVDDDKVVRKLEEVLRRALKEHRRVLEELLKVLRDVLEENRKVVEDLKRVLEEVIEKIARVKRREELLRVVEELLERVREVIKELLRVNDRVLREVEEVVKKLLKVNDELAKRVRTVVKELVDSREDKKVRDVLREIEELLERHKRLLEKLARELRELAKRHREEIKKVLETLKKLAEELTRRVR

SEQ ID NO: 13365 - protein, 240 aa, Artificial Sequence; identical to SEQ ID NO: 13364
  Synthetic

SEQ ID NO: 13366 - protein, 235 aa, Artificial Sequence
  Synthetic
SEKEELRRELEEHAKRSRDTVKRLEDENRRVLESLKRKVDTLRRINEETLREIRRLAREERLSKDVVRRVEEVVKESEDILRRILRRIKEIADESERILREVLKKSEEIIREVERVLREVDSEELLRRLREALKRNIEVLRELLELNKEVLDRLVEVIKELLERNERVLEKLVRETDSRDEKLKRDLEDLKRKHDELRKRLKEELDELRRKHEKIKEELDRHLKELEDKLREARR

SEQ ID NO: 13367 - protein, 235 aa, Artificial Sequence; identical to SEQ ID NO: 13366
  Synthetic

SEQ ID NO: 13368 - protein, 235 aa, Artificial Sequence
  Synthetic
SEKEKLTEILRRHERESERVVKELDEENKRHLKKSREIADTLRKLNEETLERIRELVKRARISEELVEKVERVAEKSKRILDEAVKRSEDIARESEEILRRARERSERIIREIRRVLREVDSDDLLRLLEELLRRNVEVLEDLLRRNLEVLRKNVRVLRELLKKNERVLEELVKTLNDTDETLKRELERLKEEHERLKEELDRHLKALEEKHREIRREIDEHLKELKRRLDEERR

SEQ ID NO: 13369 - protein, 235 aa, Artificial Sequence; identical to SEQ ID NO: 13368
  Synthetic

SEQ ID NO: 13370 - protein, 252 aa, Artificial Sequence
  Synthetic
SEKEKLIEDLRRILKETEERLKRVKERLRELLDEYRRRSEDKLRELKKELEEEEEKIRRSGLSEEAERAVRKLLKVLREVLDKLKKLNEDNLRVLEEVLRLLERLLDELLKVLRELLRELEKLAEDKQDKDEVLEDIKRRIAEVIDRAKKLLDKLRELIEESIKRVRTETDRLRKDIEKVLRDIAEDVKDDRLRKRIKETADRLREMLKRHRELLERSMELLRRALEEAKKVLDETEETARRLLKLAEDEER

SEQ ID NO: 13371 - protein, 252 aa, Artificial Sequence; identical to SEQ ID NO: 13370
  Synthetic

SEQ ID NO: 13372 - protein, 246 aa, Artificial Sequence
  Synthetic
KEIEETLKELEDLNREMVETNRRVLEETRRLNKETVDRVKATLDELRKMLKKLVDDVRKEPTSEELKRLLRELEELLRRVVRRVEELLKKSTDLLERAVKDSKDALRRSHEVLKEVAKRVKRAKDENLPREEVLRLLRELLERHAKVLKDIVRVSEKLLREHLKVLREIVEVLEELLERILKVILDTTGRDKKVEELEKALEEIKRRLKEVIDRYEDELRKLRKEYKEKIDKYERKLEEIERRERT

SEQ ID NO: 13373 - protein, 246 aa, Artificial Sequence; identical to SEQ ID NO: 13372
  Synthetic

SEQ ID NO: 13374 - protein, 237 aa, Artificial Sequence
  Synthetic
SEEEDREREYEERHKKAEEDLRRAEEEYARELRREEERLKEEAKRLEKELRDARTKLDEDEIADKIAKALREIAELLKRLVKVIRDVLRENEKLLRDIAEVLRRISRENAKLLRDAREKQRAGEIVEALRESNKRILDALREVVKALKKTNEDVLRTVKEVVKRIEELLRRLASEGNDEKAKKALDEAVKRVKEDIKRLEDSVKTADDKDRKAIRRAEETVRTHIRTNEEAVRREEK

SEQ ID NO: 13375 - protein, 237 aa, Artificial Sequence; identical to SEQ ID NO: 13374
  Synthetic

SEQ ID NO: 13376 - protein, 235 aa, Artificial Sequence
  Synthetic
SELEETLKRLKETNKRLLKKVKELVDESLRLNEELLRRLREVIRKIKETIKEVLEEGVDEKDIRKAEEILDDVLRKLEKLVRDSVRVNETVLKEVEDIIRRSLTELDKVAERLKEAKSEKVVKDVLKEVIDRNEEIVEELLERIRRVLEDDLRIVKEILDILRKVLKEILKVLEEIVDEDERVDELRKRIRKTEEEIEDIKRRYEKRVRELKETLDRIVKELRDRYKKIREEIDT

SEQ ID NO: 13377 - protein, 235 aa, Artificial Sequence; identical to SEQ ID NO: 13376
  Synthetic

SEQ ID NO: 13378 - protein, 239 aa, Artificial Sequence
  Synthetic
DIEDVLKKVLEKNLRVLREVHEVNKRVLDEIVKLLRELHRVNKRVLEIILRLLEALRRGERDREEVLRELERVVKESKEVNKEVLKRLEDIVRESLREIERVLDETRKAIKEVEKVLRERRVEERVLEMLRRYADRSRDFADKDKKKNKETLDELRKLSEDDKRINDRLVETLRRIIAQGDTSDEDLKRIEDELRRTLEEHRKRLREVERELEKKVEEHERELRKYEEETKRLLREAER

SEQ ID NO: 13379 - protein, 239 aa, Artificial Sequence; identical to SEQ ID NO: 13378
  Synthetic

SEQ ID NO: 13380 - protein, 236 aa, Artificial Sequence
  Synthetic
REEERLRELITDYKRKLDDLKRRSEDLLREYEKTLEDIRRESERTKKELRESLKRDLDREGESEKVKVLKEVEDLLDKVNKRLLEIIKTNLDLLRRVNEELERVLKTNLDLIRKVLELARRGAPEKDVKRVADEVSERAEKLLRDVEKRNREVSKRLEDLLREIKERNDEVVERVKERTDDEKVKRELEKHTKLLKEILDTVRDLNRKHSEEIRRTVEEVRKANRRLLEELKETRK

SEQ ID NO: 13381 - protein, 236 aa, Artificial Sequence; identical to SEQ ID NO: 13380
  Synthetic

SEQ ID NO: 13382 - protein, 241 aa, Artificial Sequence
  Synthetic
SELEETLKKIKELAEISRKLADETRREIKKLIDDSRKLLEDTHRTNEEMVRRVETKAKDKDERIKEVLKRVAKEIKDSNDELRRRVEESAKRLREVLEELKEKIERSIKRLEDILDLLRRGEVREEEVVRELLKVLADNLRAIEEVLRKLLRILEDNLRVTEEVLRTNLRLLKKLLDELKLDEEKLREVRELLERYREDVRRLKKEYEELLREEDKKVKKKKEDYERILRKTKKELDERRK

SEQ ID NO: 13383 - protein, 241 aa, Artificial Sequence; identical to SEQ ID NO: 13382
  Synthetic

SEQ ID NO: 13384 - protein, 234 aa, Artificial Sequence
  Synthetic
SEDEKAAEDLKKLAEESIRELEKALRDAARLHEEALKRLKKALDEAARLAERAIEEARKGLDLRRVADEVAKAAEKAARAIEEVLREVLRASNEAAKAWKRVAKRNAEAAEEAARRRRDKTAEDLLREARKAAEDSKKEADDLNREAEELARRAREEAERLLREAEKAARDAKTKKLVGEELIKLIEDLLRLAAELAKKIAELAERHLRLLEEAARKHIELVERLIELAKRDTD

SEQ ID NO: 13385 - protein, 234 aa, Artificial Sequence; identical to SEQ ID NO: 13384
  Synthetic

SEQ ID NO: 13386 - protein, 234 aa, Artificial Sequence
  Synthetic
SEDEELEKLLEEAKKLIEESSRRLDELLEEDRRVVKRIEEEVEKLLKEVKEEIDKIKKEVRELEKIKRVLDALVDVARKIVEVTKELLRDNVRVAERIVEVIKDVNRKLVDVVDKLRKTKDKRELEEILRELERENRRVSKEVEDLLRELRKRNEDVLRRIEKLLRELKKEVDELLKDLGKVLEIVKEIIDRIRKLLKKTFDISDELLRKWEDLLRRNNDLSRRLLKEAEDKAR

SEQ ID NO: 13387 - protein, 234 aa, Artificial Sequence; identical to SEQ ID NO: 13386
  Synthetic

SEQ ID NO: 13388 - protein, 235 aa, Artificial Sequence
  Synthetic
SEKEDLARKLRKLVEELTREYEELVKKLERLIEEIEKVSEESVRKLEKLLREISEEVRKLGTDSRVLKRLLERLRRIIEEDHELNTELLKRLLDLLKEILDTSRELLKRLLDILREVVRDESVLRDLERTLREVLEENERAIEEAERVLRKVLEDSERAVRDARRVLKEVDKSPTKDELLRKLVELLVEVLRRLIRVNRELVKLLREVLERLLRILRESVKKLKRLIEKVIKDET

SEQ ID NO: 13389 - protein, 235 aa, Artificial Sequence; identical to SEQ ID NO: 13388
  Synthetic

SEQ ID NO: 13390 - protein, 242 aa, Artificial Sequence
  Synthetic
KEEEDLLERVKRVLDELIEIVDRNHELNRRVVETSARLVERLLEEVERALETLEREIPNRKLLDKAIKDLRDVLRRVKEKVKRSIEELKEVLEESRRVLEEVVRKLREVIDRVRRLVEKGVDLRDLIRELKRVLEEAVKLIERLVRLNTRAAEKDNESLRELVRAIKEALKRAVDMVRADGLDSRLVKKLDEIVKEVAKKLEDVVRRNEELWRKLVELNKESVRRLREIVERVARDLEETAR

SEQ ID NO: 13391 - protein, 242 aa, Artificial Sequence; identical to SEQ ID NO: 13390
  Synthetic

SEQ ID NO: 13392 - protein, 232 aa, Artificial Sequence
  Synthetic
RRTEEVIKKIAKLIDELIETLKKIVEDSAKLIKELIDLLEEIIKRSADLIRELEKVSKRGDRDRLKKLIDRMRRETERALEELRRVIEELKERTERALKTIEDLIREIEEAIRRELEDEDLAREILEVIRRILELLREDMELNLRALEEILRLLEEVIKLNKDAIDEILELLKKSEERRIAERIRELLRESKKLVRDVVEEAKRLLKENRDSTRKIIEDIRRLLRKIEDSTR

SEQ ID NO: 13393 - protein, 232 aa, Artificial Sequence; identical to SEQ ID NO: 13392
  Synthetic

SEQ ID NO: 13394 - protein, 242 aa, Artificial Sequence
  Synthetic
DKEDIIRRLARVLERHDEANREVVKEHDEVLEEHLDVHRRVVRSNIEVLRTLLELVEKLDSEDLKRVLDEVRKRLEKSLEELERRLRESDKKSETVIRKNEKAVRESAEALKDVIRKLKEARDDEKVKETAKKVRELLERLIELNRRWVEALRRLNERLNKLNRDAIELSRRLLKELEDLTREGVPEKDIRKVIEDIERLHRESMEEVRKLVEEIKRLNKEVLKRSEELVEEAKRLLKEVAD

SEQ ID NO: 13395 - protein, 242 aa, Artificial Sequence; identical to SEQ ID NO: 13394
  Synthetic

SEQ ID NO: 13396 - protein, 247 aa, Artificial Sequence
  Synthetic
DTKEVIEKLIRVLERAVKLLRELVDRDNRSLKKAVDLHREVVRKIIEVLEEAVRLLATVKEDEKLKRVLEEVVKELERVLKESEELVRTVIRDNREVVKDARELVREVERELKKVIDDARRRTDDEELRKLLEEIKKVLDDLRKLLDTNIKISEKVLRDWERLNRELAKILKDVIRKLEELARKMRDEEKLLREVERLVRELAKRLRESLKTVEDLVRELADTNRRSVKTVEDIVRDLERKAREVTR

SEQ ID NO: 13397 - protein, 247 aa, Artificial Sequence; identical to SEQ ID NO: 13396
  Synthetic

SEQ ID NO: 13398 - protein, 248 aa, Artificial Sequence
  Synthetic
SKRELLERVIREAERVLKEWEDLLRELTETSDRVIRDVERLLRELLRKAEEVIKDILRKSDDEELRKLLKRVRELLKELADILKRLVDEHRRLVEENIRIVRTAIELVKELLKRLADLLESGLPREDLTREVEKVLRELEEIVKKVKRDSERIVEDNRRLSEELRRLVEEILERLRRLVDDLIKKKDKDEDLKRVLERLTRVAEEILELLEEVLKKSNRSLEKAVEANAEALDRLIEVLRELLDDLRK

SEQ ID NO: 13399 - protein, 248 aa, Artificial Sequence; identical to SEQ ID NO: 13398
  Synthetic

SEQ ID NO: 13400 - protein, 248 aa, Artificial Sequence
  Synthetic
SKEELLKKVEDEARKVLEEWKEEVKRLIEESKRVLDDWRRLVDEVSKDIKRVIDEARKDSEDKDLEEVADRVRKLLEDNKRIVDEAIRRHEELLDENRKIVERVIELLEELLDEIAKLTRSGKPEEELIRRAEELVRRLAEIVERVIRESRRIVEDNRRISREVVERSKEIVDRLRKIVTELIKKKDKDEDLKRVLEKLIKVIEKIVRLNEEALRKSNESLERIVKLNEEALRELIRVIERLVELVRK

SEQ ID NO: 13401 - protein, 248 aa, Artificial Sequence; identical to SEQ ID NO: 13400
  Synthetic

SEQ ID NO: 13402 - protein, 230 aa, Artificial Sequence
  Synthetic
KEREEIDELVKELEKELRRLVRENEKLVEDNERTLKRLLEENKRLVEELVKRLRDGLDRDELKKVLDDALDANRKSVRRLEESAEEVLKTNRRSLERAIDLLRRALEEIADKVDKRDLLEEIERLIRELIRRLERVHEEIERLIRRSIEELRRIHEEVEKLIEDVKRVADRVDKDEVVEIVIRVLEEILRLSEEALRIHIRVTREVLRLSKELIDEIRKVLREIADRIRK

SEQ ID NO: 13403 - protein, 230 aa, Artificial Sequence; identical to SEQ ID NO: 13402
  Synthetic

SEQ ID NO: 13404 - protein, 245 aa, Artificial Sequence
  Synthetic
SKEELLKELLDRVRRVLTEIKKLLERLLRRSKEVIDDSERLVREVLKRVEDLAREIKAERSVDDRAVDRMLELVERWVELWKRVLELLEEISRRIVRLIERVLELLLKVVEEVLKRLTEVRTEKELKDVLDTVEELLKRVLDELRKVVEEIRELHREVLEANEEVMDRVEKLLKEVRDTLRRRLKDKDALDKLRRLIDELARLLREVHERDKELIRDHLREVEEIAKEIARLIKRLAEEIREITT

SEQ ID NO: 13405 - protein, 245 aa, Artificial Sequence; identical to SEQ ID NO: 13404
  Synthetic

SEQ ID NO: 13406 - protein, 245 aa, Artificial Sequence
  Synthetic
SERELAKRALERAKEAAEESKRLAKELLDRSRELAKRSKELADEVLKRAKKAAEEIKKKRSADDRAAEEALRAAAEWARLWKEVAELLLEASRRAAELWKEVAEEALRAAEEVARLLEEARTEEELKKAAEDAERLAREVLKANEDALREARRLHREVLEANDRAAEEARRLAEEVRRELDKRAEDKDAAREARKLLKDLLELAERAHKKDRDAIEEHLRLAEEASKRDKELLKELLDLIREIAR

SEQ ID NO: 13407 - protein, 245 aa, Artificial Sequence; identical to SEQ ID NO: 13406
  Synthetic

SEQ ID NO: 13408 - protein, 231 aa, Artificial Sequence
  Synthetic
SKEEEVEKVLRKWEEILRRLIEENKRANDKIRREYEELVKEIRRVLEEIKEVAERLRVSEEVKRILEKLIKLLEDILEYEKENVERLIELNERILRELKKSVEELKKLVTRVRRDKLPESEVRKLVEDVLRKNEELLKEAKKAWRDSIENLKRVLEEVKKLVKTVLREIEEKIDDKDVVRKLIEVIERLLRVAEEVIRRILKVNTELMRVDERSIRESLKAIREVLKVLDT

SEQ ID NO: 13409 - protein, 231 aa, Artificial Sequence; identical to SEQ ID NO: 13408
  Synthetic

SEQ ID NO: 13410 - protein, 245 aa, Artificial Sequence
  Synthetic
SKEELVDTVKKKLEEVLKKIDKLSRDVKEKLRRVIEELRKLSREVHETNREVARRLREEAALEEIVKLLEESAKRATKLLRDVVRRIKEVAKEASELLEELVREIARVLDEVVKLLAEAGVPEELVRDLERLVREAVRELERLVEEHKRLVEEAAKRLEKLVEEHKKISEDVARRLRELLEKISDEETVLRTLEKIIRDHNKAHKRVTDAVAKILEELIKLHDEVSRRLKDILRRLLELLDEVTR

SEQ ID NO: 13411 - protein, 245 aa, Artificial Sequence; identical to SEQ ID NO: 13410
  Synthetic

SEQ ID NO: 13412 - protein, 245 aa, Artificial Sequence
  Synthetic
RKEELVDTVKKDLERVIETVRKLSEDVKEKIRRVLEDIDRLSKEVHETNKRVVEELEDKKSLEEIVKLLEESAKRASRLLKELVRELKEVLKEASDLLREIVERVERVLKKIVDLLRESGTPEELVRTLEELVRRVVERLKKLVDDHEKLVKEIAEKLEKLVEEHERISRRVVEELRELLRKISDEETVLRELVKLIRDHNRMHEEVVRRLKKIIEEALKLHDEVSRRVAELLREVIELLDRVAK

SEQ ID NO: 13413 - protein, 245 aa, Artificial Sequence; identical to SEQ ID NO: 13412
  Synthetic

SEQ ID NO: 13414 - protein, 245 aa, Artificial Sequence
  Synthetic
DKEREVDEILRRVTKLLKELEKRSKEILDRVRELVREYKRKVEEILKRVEDLIRRLIKDKKEVEEIETVLKKILDVVRTIVELLKESLDEAVKVVEDISRVNRESLDRIRKVVEEIVEVIKKVRTKEELKEVIDRIAKKLDEVLKRNEEVIRRVARRLEEVHEKNRRAIEKAVRDLRKVLKELEERGVSLDELRKILKELEELLRTLNKELKEVVKELRELLKELHDRLREILEELKRLLEEIAR

SEQ ID NO: 13415 - protein, 245 aa, Artificial Sequence; identical to SEQ ID NO: 13414
  Synthetic

SEQ ID NO: 13416 - protein, 245 aa, Artificial Sequence
  Synthetic
DEDELIRKLLEDLKDIVRKILELIERDLRDIERVVRRIVKVIRDDLKKIKEVVDDIRRRVPRTEELERVIKRIEELLRTSEEELDRILKEIEELLRESRRRLEEVVKAVEELLRRVEEIVDKGRERKEDVIKLLREVVDDILRLVEEVVRTNLEIIKRILELIERVIRLNLKIIRDILRLLEETVDSELADRIRKLIEDLERHTKKVLEDVKRAITELRKNSKDILEEVRKLIDELRKRIKEVED

SEQ ID NO: 13417 - protein, 245 aa, Artificial Sequence; identical to SEQ ID NO: 13416
  Synthetic

SEQ ID NO: 13418 - protein, 232 aa, Artificial Sequence
  Synthetic
KAEEIAKIAVDAVRKIAELLRRASKINLDAIRKAAKLSKEASKINLDAIRKIAEEVKDAEEIKRDAERIAREDAEAAKRSAELAEEIAKRDEDLARRLEEEAKRLADEIRAEKATEEAAEKALRAIDELLKRAKRASEESARLAEEWIKEDKRLSEESAKLIEDLIRKAEKKNRVDRKALEKARKLAEDALRANKRANDEAKKLADEALKENRKALEDAKRLARKAAEDAKR

SEQ ID NO: 13419 - protein, 232 aa, Artificial Sequence; identical to SEQ ID NO: 13418
  Synthetic

SEQ ID NO: 13420 - protein, 246 aa, Artificial Sequence
  Synthetic
SEEELLRRIRELLKKALEDNKDVLREIEELLRKVTEDNDRVLEEIRKLLEEVDEVVKRAGVDEELLKLIEDILRTEKRVLEDWKRLVEETRKAVEDLLRELERLSREVVERVERLLDELRRRNDEDVVRKIAREVEKIVDTHRKVVDDIRRKVEEIVKKHEELLRDIERKVEEIVRRLKEILERVDKDELRRVVEKIEKVLRDVVRALRELVRINARVLEEILRLIEELVRRNAEVLKRILELVAT

SEQ ID NO: 13421 - protein, 246 aa, Artificial Sequence; identical to SEQ ID NO: 13420
  Synthetic

SEQ ID NO: 13422 - protein, 238 aa, Artificial Sequence
  Synthetic
SKEDELRKAEEDARRVVEEILDLNRESVEKSRRVAERVLRLNEDSVRKSRDVVRRIKEEVNTDDKLLDILEKVLRTNERLSERDLRLIKTILELNERLSERDRRLIKKILEDVRRLVELVRRGTREEELEELVRELIRRIEDILRESEELVRDTIKKIEDILKESEDLVRRTIEEIERKVDDRDVVRKLIEANEDHLRVNKEIVDRLIKANEEHLEVNRRAVEKLIEVLKRLLDVARK

SEQ ID NO: 13423 - protein, 238 aa, Artificial Sequence; identical to SEQ ID NO: 13422
  Synthetic

SEQ ID NO: 13424 - protein, 237 aa, Artificial Sequence
  Synthetic
SEKEDLVRTIEEVVKTIEELVERHERKIDEIVKRSRELVRTHVEKIEEIVRRVEELVRRGGSRDEELRRRILDLVEKLFKHVEEVLKTILKLSEELLKHVTEVLERIRDIIRRLAEKLRRNNVKRESLEKVLEKAKRVLDDVKKKLEDSADENRDVLRRVKEELERSLDKLRKILKSNSDLDTLAEEVKRVLKEHVDLVRKAARLDSETLKKHVDLVRTAAERVSEVMKELVELVRR

SEQ ID NO: 13425 - protein, 237 aa, Artificial Sequence; identical to SEQ ID NO: 13424
  Synthetic

SEQ ID NO: 13426 - protein, 237 aa, Artificial Sequence
  Synthetic
SEIEELVKDIERIVREIKKLIDDHVRKLEKIIEDIERDMRRHEETVREVVRKIEDEVRRGGSRAEEIKRRILEEIERLVEHVKDLLRRILELIERLAENIRRLLRRIEEIVTELVERLRRLNVKRESLEKVKKKAEDIIRRVKKELEDSLEELKDILRDAKRRLDESLKEIREILKSNSDLDSLAKKVSDVARKHLDLARRVIKLISEALKKHIRLVEKAMEDISRILEDLVRLVRK

SEQ ID NO: 13427 - protein, 237 aa, Artificial Sequence; identical to SEQ ID NO: 13426
  Synthetic

SEQ ID NO: 13428 - protein, 236 aa, Artificial Sequence
  Synthetic
SKLEDAVRRIEEILRHIVRSLEEVVKDIEKILRDHVRMLREVVKRIEDVLRRVVELLRRAGDQRELVRELEELVRELVERLRRIVKRNEDLVRDLLDKLRKIVKRNEKVARELVERLRRRGESKEEAVELLREALRLNKKSVEDIERLLKELLDLAEESVEEIERLLRDILKKIADVITDKDVLREVAERIRKVIERLKELLDRSRERAEDVIKKLRDLLKENERLIEEVRRRLEK

SEQ ID NO: 13429 - protein, 236 aa, Artificial Sequence; identical to SEQ ID NO: 13428
  Synthetic

SEQ ID NO: 13430 - protein, 228 aa, Artificial Sequence
  Synthetic
SREEAVADVIRRLEEILEKNLRLLEEIIRRLLRILEHNLRLNEKAVEIIEDLIRKLLRDEKVIREAKKTVEEILRESKRVLDEVKKKLEKILRDLERVHEKVMRDIREILKRNKGKERALETLRRVVEELVRVTEEVAERLKEVVKEVVEANRRVLEKLKKLIEELAEKVVKSRLADDLRRVVKKIVEDLEENLERIKDIIRRLVEELERSLEEIRRLIDRLVKEIRR

SEQ ID NO: 13431 - protein, 228 aa, Artificial Sequence; identical to SEQ ID NO: 13430
  Synthetic

SEQ ID NO: 13432 - protein, 234 aa, Artificial Sequence
  Synthetic
SEEEAAREAERLLEEAARVAERIVRDSERLLDEAAEVARKAVEDSKKLLEDALRAAREGQPRDAIREAAKELEKESKRLAEEIKDAARRLKEETDRLLEEAKRAAEELKKEADRLATEGAAAEDAARALKEAADLLVKVAEDLARANKEAADLLVEVAEKLNRANKEAAELLKKLADDREAAERVARRAERANEEALKEAEEVIKRAKEANKRALEEAKRVIDRADKALKEARK

SEQ ID NO: 13433 - protein, 234 aa, Artificial Sequence; identical to SEQ ID NO: 13432
  Synthetic

SEQ ID NO: 13434 - protein, 247 aa, Artificial Sequence
  Synthetic
RDRDVLRKVKREIEELVRRIEKVSRDALKEVKRLLDENRKIAEDVLRLIERLLRKIRDTRNDDRVVKETEEVLRDNHRLLEELIRRLIKVLEEWLRRHKKLLDEIRELLKEILRLVKESGVSEDLLRRLKRVIEELDKKLKESEEKLRRVVEKAKEDLKRVLEEHRKVLEDLKRALEEVREKLRERDREEVVEELLRMLKRVAEEMKRVHDDLSRAVEKVVRDVVRVDKELLDELRRILRRLEEVIT

SEQ ID NO: 13435 - protein, 247 aa, Artificial Sequence; identical to SEQ ID NO: 13434
  Synthetic

SEQ ID NO: 13436 - protein, 231 aa, Artificial Sequence
  Synthetic
SKDEELMRLLEELVERWRKIVEDLERDHRRLVKEIRELVERIRKKLEELVDRIRKNGIDERIVRLIEEIAKIIEEVLKEIVKLVERAVRENVRVLRESVRLVAELVETLARLLRGADERVTEAIKKVLDTSEDLIRRVIKVNEDILREIAKLVEEVLREAERILTEIKKEVDREEIRRILEELKRIVDDVLRIIARILKLLRDLTRRLAEVAKKVHKLLEELLRKLKEDTR

SEQ ID NO: 13437 - protein, 231 aa, Artificial Sequence; identical to SEQ ID NO: 13436
  Synthetic

SEQ ID NO: 13438 - protein, 234 aa, Artificial Sequence
  Synthetic
KDAETLEKVLRDVLERADEIIKRLEDIYREIKKRLEAIIKEAEDINRKILEEIRRLAEDRKALADVVRKVAEDNLRLNRRIAEVLRELVKRALDVNEELARVLEELLKRLLEIVESANVDELRDIVDKVLKTVKKLLDESRRVAERLKREVERLLKESEDIVKEILERVEELARKITDVKRALEELKDLIDRNLKVLKDLLDATRKLIEENIRVLREILKRIKDIARELLEATK

SEQ ID NO: 13439 - protein, 234 aa, Artificial Sequence; identical to SEQ ID NO: 13438
  Synthetic

SEQ ID NO: 13440 - protein, 242 aa, Artificial Sequence
  Synthetic
SSKEEVLELIKELVRSSKEVLERVVRLNEKSLRISVEVLDRIVELIEEIVRIVVRELEKKVDERLVRKLKKVLEEAKERVERLVKENRDLIREVEEKSKRLVDENKKVLDEVVKEIDEVAKGELDSEEAVRRLLKILDETLRRHKEIVERLLKVNKDLLDRHREILERLKRLLEETLKRVKDTVPEIRELLKEIKRIIEEIDRLVKESLKRHKDINDEIRELAKRTLDEIKEVIDRIRERLR

SEQ ID NO: 13441 - protein, 242 aa, Artificial Sequence; identical to SEQ ID NO: 13440
  Synthetic

SEQ ID NO: 13442 - protein, 234 aa, Artificial Sequence
  Synthetic
SEEEDVIRDVKRRLEEILKTNADVIRDIEEILKEVKERNKRVVEELKDILRKVLEELRKKGVEERVLRLIEELVKKIEEILKRHLKLVEELLRLLREVLKRHLTLLEELVKLAKEVLDARLPKDELKKLLDRLLEEVRRVSDEVRRILEELLKRVEEVVRESKELLKRLLEEVEKLGVGKEVVDLIREIVERLARAVEESLKLLKEIIDLLTESSKELVKLLEEILRTLKEAAR

SEQ ID NO: 13443 - protein, 234 aa, Artificial Sequence; identical to SEQ ID NO: 13442
  Synthetic

SEQ ID NO: 13444 - protein, 235 aa, Artificial Sequence
  Synthetic
SDEERLEKVVKDVIEKVRRILEKWKKDIDKVVKELRRILEEWEKIIREVLDKVRRLKDEVDMLVKVLEEILRLAKELSKRVEEVLREILKLAKRLSDELVKVLREIVKRARDITRDDKLRKIVEDVKRELEDLARKDRKILDDVRELLERIAKEDKDILREAEETLRRLADEMRRTTVDERLLKRVVDILKRLLELNATTIERLLRILEELLKLNKELAERVIRVLEKLLEEIKR

SEQ ID NO: 13445 - protein, 235 aa, Artificial Sequence; identical to SEQ ID NO: 13444
  Synthetic

SEQ ID NO: 13446 - protein, 235 aa, Artificial Sequence
  Synthetic
KDMERVLTEHKKAVKELIELLERLLEEHERASRELIKLLRELLERHKRATDELIKLLRENKRRDEEIVRRVEEITKRVRKIVTEIVERAREITEKIKRIVEEIAKRVREVTKRLEDELKSEKAKKVVDLSREVVKIIEKVLDELVKLSKEVVDIITRVLEELVRLSEEVVRIITELLRRVEEVVKRLEDVNRTLEEIIRKVEEEAKRVNEDLRKRIEDVVRTLEEVNKRLKEITK

SEQ ID NO: 13447 - protein, 235 aa, Artificial Sequence; identical to SEQ ID NO: 13446
  Synthetic

SEQ ID NO: 13448 - protein, 240 aa, Artificial Sequence
  Synthetic
SELEEVAELLKRSKELIDEVEERIRRLATESLRFLDEVVRRIRELLTRLLKEVRDSGVPDELIELIERVIRLIEKVLEDIKRLIEKNIELAERVLEAIKRLVEEDIKLLIEVLRRKEEGRPEKDVKELLKRVEESVKRSLTEIRKLLEEVRKSVERTLEEVKKLAEDVLRLVEEVLKRAKDRGVDERLLKKTEDVVREILRLIEEVLRTHAEIIREILELIERLLELHKTLVDRLLERIE

SEQ ID NO: 13449 - protein, 240 aa, Artificial Sequence; identical to SEQ ID NO: 13448
  Synthetic

SEQ ID NO: 13450 - protein, 235 aa, Artificial Sequence
  Synthetic
SVLETVKRLAEESSERIRKIVEDDKRVADDSSRKIKELIEEIKRRVKELLDRIKDLDSTEDLEKLLDELLKEVKRLLEELLDAHRKWSDDSRRLLERVLRTHKELIDRLIKLLRDAGKPEEVVRRLEKVLRESLRRVKEVIKELIDLNKETLDRLKKIVEDLERVLREVLTELRRKRDKKEVVIRLIEELVKLLEDVLRRLLEVNETLVELNKRVWDRLVRINEELAEVALRVAT

SEQ ID NO: 13451 - protein, 235 aa, Artificial Sequence; identical to SEQ ID NO: 13450
  Synthetic

SEQ ID NO: 13452 - protein, 235 aa, Artificial Sequence
  Synthetic
SVLETVKKLLEDSSEKIERIVEEDERVAKESSDRIRRLVEEDKRVADEILDLIEKITDTDTLLKLVEEWSRTSKKLLDDVLKLHKDWSDDSRRLLEEILRVHEELIRRVKEILDREGKPEEVVRELEKVLKESLDTLEEIIRRLDEANRRTVKRVKDVIRELEDINRKVLEEIERKRDDKDAVIKVIEKLIRANKRVWDALLKINEDLVRVNKTVWKELLRVNEKLARDLERVVK

SEQ ID NO: 13453 - protein, 235 aa, Artificial Sequence; identical to SEQ ID NO: 13452
  Synthetic

SEQ ID NO: 13454 - protein, 251 aa, Artificial Sequence
  Synthetic
SIRELLKELEDVVREIIRDIRRLLEESRRVVERIERETKRLLDEIRDVARRIEETIRRLPLPEEVVKDVLDMIRRLVKEIEEVVRLHLELVREVLESHEKSVRDVEELIRRLVEVVREVVRKLEESRDKDTLKKLVEDIKRILEKILRDIERLNKENARLIERVTEELRRAADRVRKIAEDILRRIEKAGLKKEAVDELRRLLEELKKIVEDILRTLEKLNRELLEIDKRVADRLRELLRTLKKLIEEAAT

SEQ ID NO: 13455 - protein, 251 aa, Artificial Sequence; identical to SEQ ID NO: 13454
  Synthetic

SEQ ID NO: 13456 - protein, 230 aa, Artificial Sequence
  Synthetic
SKEEAIKELLKKHKRITEDIIRMARELDREHEEITREIAERLRRLLKKLLDDVRREVKDERLLREVKKILDEIEKILREALRRTKEILDETKKILDRALKETDEVLERIKELVERGEPKEEVLDAVRRLVELDKKAVDDWNRVNRDLVRVDKEVLKTLLDVIRELIKVLKARTDDERAKRVLDKILDDVRRLVEEAAKLLDESVKKSTDIVRRVRKLLDDSLKEVAELAK

SEQ ID NO: 13457 - protein, 230 aa, Artificial Sequence; identical to SEQ ID NO: 13456
  Synthetic

SEQ ID NO: 13458 - protein, 230 aa, Artificial Sequence
  Synthetic
KKEDDVRRLLKEHEDITREIIKLIRDLARKHLELNKRVIRALEKVLKDLEDEVRKDVRDKDLLRKIKELIKKVEKILRKALKDSKDLLKRLEDILRRALEETKKVLEEIERLLKEGRPREEILEVVKKLVELDKRALDEILEVVTDIVRVDAEAIETALRLIEEIIRELKANTTDERVRRVLDRVVERVAELVREWKELLKRSLDEVREVVKRARDMLRRSVKTVKELVD

SEQ ID NO: 13459 - protein, 230 aa, Artificial Sequence; identical to SEQ ID NO: 13458
  Synthetic

SEQ ID NO: 13460 - protein, 241 aa, Artificial Sequence
  Synthetic
DEVEDARKKLEDLERENRKVIKEIEDALRELVKDHDRVVEELRRRLRRLLEELKKLVDDRKRREETEERLRRLLEALKKLLKELIDKHREIAERMLELARRAIKISREIIEKVREILRRAGVPEDVVREIDKVVRDSLKRLEEVLKRIEEELRRSLKRLKEVLEEIKRKAEELEDILKKIKDEEMLKRVVDVLEDLVRTIEKVLRELSETLRELVRRLLELLRENNESVRRLIRILEEALR

SEQ ID NO: 13461 - protein, 241 aa, Artificial Sequence; identical to SEQ ID NO: 13460
  Synthetic

SEQ ID NO: 13462 - protein, 240 aa, Artificial Sequence
  Synthetic
SEDEAAERLLREAKKILKRLEDAARESLKSAERILEELEKAARDSLRKAEKIIRDAKRKGLDEKALKRAKEALEKAERDHRRALKRAREAIEEAAKRHKEALEEAERAIKRAEEEARKAKKESDERTAAKRLLDAVKELADAAKKAADRALKANEDLARAAKEAADEALEANKRLAKALRDDTTDKEAEKLATKLVEDSERAAREAKKLADENVKRSKEAAEEAKRLADRLVKEAEDDAR

SEQ ID NO: 13463 - protein, 240 aa, Artificial Sequence; identical to SEQ ID NO: 13462
  Synthetic

SEQ ID NO: 13464 - protein, 244 aa, Artificial Sequence
  Synthetic
SEDEELLKRLDELLKEILKVIEELIRRLEKAHKENMDKIRDSARRLRELLRKLAEDEREPTSEETKKRLVDELKELVRRSVEELRRSVEDLKRLVDEVRELLERLLRKLEKLVREIARELEKRSRSDELEKKVEELIRVAETVVKLVADVVRLLIEVAERAVELNREVVKEHEEILETVVELLARGGREELVKEILERVDRLLRKSLERLREVLEESRRRLEEVLRALEEVIKRVRDLLRKLRE

SEQ ID NO: 13465 - protein, 244 aa, Artificial Sequence; identical to SEQ ID NO: 13464
  Synthetic

SEQ ID NO: 13466 - protein, 238 aa, Artificial Sequence
  Synthetic
RKKEELARVLEESLEVNRKLVRDLAEVLRKDLEIIRELVKRLVEILKKILKVLADVIRKEELRRALKEAEEVLRKLIRTLEEVVRRHEEILRKLIEDLKRVVKRWEEVVDRLIKEIEDLEDVLRKLLEVVRRSVRELEKILERLKRSVEEVIKRITEVLEELEKLVRDLIDVLRRAGLDEETLRKVVEDLERLLREARRVVKEAVEKSRRSLEDLRRIIEEAIRRNEKILRKLKEIVK

SEQ ID NO: 13467 - protein, 238 aa, Artificial Sequence; identical to SEQ ID NO: 13466
  Synthetic

SEQ ID NO: 13468 - protein, 244 aa, Artificial Sequence
  Synthetic
KEDELLRRIKEVIDKTLEDMKRLLKKHKELLDEILRLLAELVEENKKLIDEILKLVEDSGIDEKALDELRRVVEEVKEEHKRILEEVARAIKRNKEKVDRVKERVEKVAKEVKDKLDELKRDSDKDKVVREIDRVLKELVDVIRELVKELIDSAKESVDVLRKVVEDSERVLRKLVDVLRRVLDSEEAKELVRRLKRAVEESKKKLDELVKDVKRLADDSARDLRELVKRIAELVKKIRDELRD

SEQ ID NO: 13469 - protein, 244 aa, Artificial Sequence; identical to SEQ ID NO: 13468
  Synthetic

SEQ ID NO: 13470 - protein, 244 aa, Artificial Sequence
  Synthetic
DAEEALKRAREVLKEAADLNRKAVEDARKILKDAADDNKRALEEAERVLRKALEDAKDARARNEDERKALKLLADAAKRIAKLIEDASRATADALRKIAEVIKRASELLARAAKEIARLAREAAERADDEDLRRIAEELAKRLEKLAKEHKDIADRIAEELKRLAREHNEIAKELARRAEELAKKARNAEKAAEDAKRLLEEAEEASKKLIKAAEELLRELAKASKRALDEARKLIEEAEKAAR

SEQ ID NO: 13471 - protein, 244 aa, Artificial Sequence; identical to SEQ ID NO: 13470
  Synthetic

SEQ ID NO: 13472 - protein, 244 aa, Artificial Sequence
  Synthetic
SEREDLLRLIEEVIRELIKLLETNLRLNEETIRTLIRLIKKDLDLNRRSVEELVKLLKERVRDEEKLRKVLEDLERILRKIEKVNRDVIEKLKEILKELRKIHERVIRELERILEELARVVEKLDSEDLARVILDILRKAADVLREVLERSERVTDKIAEVVEEVLRLNREMVREIIEVLKKVLDSEAADEVRKKLAEDERLNDKSLEELKRILDKDREINRRVAEKLTRILETLRKIIEDVAR

SEQ ID NO: 13473 - protein, 244 aa, Artificial Sequence; identical to SEQ ID NO: 13472
  Synthetic

SEQ ID NO: 13474 - protein, 241 aa, Artificial Sequence
  Synthetic
DDLERVLDELRRIIEEIKRRIDKILEDYERVLRDAKRLIDDVLREYRRIIEELKDLLDKVRSEEAVRRIIEVLKKLNEVSRKLVEAIIKVLRELSEISERMVRLAEELLERLVEVLAKGGLPEEVIKTLKKVVEELVRRLREVVKRDRELVRKVEKVLREAVERDKRIVDRIARLLERDGVDKDVLERIKRLLDELRRANEEVVRRVKKILDESLKENRDVVRELKKILDELLEIVAEAAR

SEQ ID NO: 13475 - protein, 241 aa, Artificial Sequence; identical to SEQ ID NO: 13474
  Synthetic

SEQ ID NO: 13476 - protein, 238 aa, Artificial Sequence
  Synthetic
SKKERLKKLIKEHLDLLRRLLKELEDLIRKHLELLRRLLRRLKELLRELLKLIEELVSDEKVLRDIRRVVERVLEELDRVVDRSEKVVREVIERLRDALRKNTEVVKTVIEKLDKIEDEDTALKVLEEVVKESVRLVEEALDIAVTVVKESVDLVRRLLDSLLAVAKELVDLLREVLRKADLRDRVEKEVRRALEKVERLIREIKRLVERSLEEVEKLIREIKKRVRDSLRKVKKESE

SEQ ID NO: 13477 - protein, 238 aa, Artificial Sequence; identical to SEQ ID NO: 13476
  Synthetic

SEQ ID NO: 13478 - protein, 242 aa, Artificial Sequence
  Synthetic
DEIETVLKRLAELIKESLDLLRETLDELRKIIEESKKSLEDVLRRLKELIDRLRRLAEEKTGEELLRLLIEVIERLLKVVEDLLRESNRVVERLIRVNREALRLSNRVVADLLKVLKDAAPDVEELRKLAEDVLRENRELSRESVKIAEKMLEENRDLTRRLKELAKKVLEEIRDLVRRVRDKDELLRRVEEILKRLLELIRRIIEEHRKILERLLETHEDLIRKHEEILRRLLKAADEERQ

SEQ ID NO: 13479 - protein, 242 aa, Artificial Sequence; identical to SEQ ID NO: 13478
  Synthetic

SEQ ID NO: 13480 - protein, 238 aa, Artificial Sequence
  Synthetic
SEKEDVLRRVEEIARRVRDILRRNLEKVERIAEELKKINDDLLKEIERIIKELKEVLRDVKDKDLVERLLRVLAELVDVLREVVKRSVEVLEKLIRVNEEVIERLREVLRELVEVLARGGVPREIIETLRRLVERLVKILEKNKEDLKRLVDENRDLAKKVLEILKELIKRLRDVLRERKEAIEEVLEILDRILKTARDVSKENLESLKRALELDRRTNERLEDLLREILELLRKDIQ

SEQ ID NO: 13481 - protein, 238 aa, Artificial Sequence; identical to SEQ ID NO: 13480
  Synthetic

SEQ ID NO: 13482 - protein, 246 aa, Artificial Sequence
  Synthetic
SELEELRKLAEEAIEAAKRALDRLHKLSRELIEAAKEILKRLKKLSEDLIRAAEEAARRSESEKALEDAKRAIDELRRATERVEKRVREAIKELEEANKRVAERARKAIEELKEAVRRVEERARRGETKEAAEEALKAVRDAAKAAREAAEDHLRALKKAAKAAEEAAEEHLRALERAARAAEEALRGEDAKRAKEIAKEAIERSKKIADEAREIAKRAIDKSKKIAEEAKKIADEVLKRAEDIAR

SEQ ID NO: 13483 - protein, 246 aa, Artificial Sequence; identical to SEQ ID NO: 13482
  Synthetic

SEQ ID NO: 13484 - protein, 250 aa, Artificial Sequence
  Synthetic
RESEELIRLLRKIIELLEELVERIRDLLRKHLKLLEEVVELLKRNLDEILRLLEEVLREANVEDAKKVLTDVADLARKSLERIKKVLEDSRRLAEEVERAVEEVLERVKRLVEELEETVERLKDGRKEEVLKVAKDILDKIVELVERLLRVVIEVVKKSIDLLERLLEEHERVVTEIIKLVKRLLEKAVKDTEKAKKLEELLRDLLRTVREIVKEVRELLEESLRTAEKLVEDIKRELDELRKRLKELVD

SEQ ID NO: 13485 - protein, 250 aa, Artificial Sequence; identical to SEQ ID NO: 13484
  Synthetic

SEQ ID NO: 13486 - protein, 239 aa, Artificial Sequence
  Synthetic
DEERLVEEIIRTIKRVIELNEESLREIERVLEEVIKMDKRSLEEIKRVLDEILKLARDGDVSERLVERVERLVRRLIRKNEEIVRRVREKVERLIRKNRTLVDDVRRKVKELIEKLRRTGLKEDLERVLRKILELLERLSEDTARVLEELLRLLEELSRRTAEVLKRLLDILRELAKLRGEELERVLRELKKVLEELIKDNERVNDELRRVLEKLKERNRKVLEDIKRVLEELRDEVER

SEQ ID NO: 13487 - protein, 239 aa, Artificial Sequence; identical to SEQ ID NO: 13486
  Synthetic

SEQ ID NO: 13488 - protein, 241 aa, Artificial Sequence
  Synthetic
SSEEIIRTLEKAIRESEEKLERLVRRDEEVVKDLRTKLRENLDRVRRMVEELVRMLESGKPAEDILREAERLSKENIETLEEILKKAERVSEESIRVLEEILKENEEVVRKIIKDLPKTEKADEVVERLKELLKRSEDVIRKVVEDSERLLDRLRRVIEDVVRRSRELLTKLREVVKRVRDKDTLVKVLKEVLERHVEADEKAVRELAKVLEENVRLLEELVRVNKEVLRRILELVKELAK

SEQ ID NO: 13489 - protein, 241 aa, Artificial Sequence; identical to SEQ ID NO: 13488
  Synthetic

SEQ ID NO: 13490 - protein, 233 aa, Artificial Sequence
  Synthetic
SKEEKLKDDVRRVLEDLDRVLKELEKLSEDNLRELKRVLDRITDLHRRILDELRKKITEEELLRRVEKVLKDNLDLLRKLVEEHKESSERDLKRVEDLVREIKEVLRKLLELEDRDTDIRKIEEEIERLLRKIRKAVEESKDLNRRNSERIEEVMRRSEELARRLLKEIRERIDSKVAEDILRVLEKLVKVSREAIKLILELSEHHVRVSTRIARLLLDVARKLFEVIKEAER

SEQ ID NO: 13491 - protein, 233 aa, Artificial Sequence; identical to SEQ ID NO: 13490
  Synthetic

SEQ ID NO: 13492 - protein, 233 aa, Artificial Sequence
  Synthetic
KKEDELEKMVRDVLEDLDRILREAEELSRKNNDDLRRVLDRLRRLAEEVIKRLEEKVTIRELLEELKRVIRELLRRVKELVEEHHRSSREDNRLLKELVERIKKVLEELLRLVRNDTDRREIKKLLDELKRLIEEVARESRELNKKNSERIREVVERLERLVEKLLEDVARTIDSEVARVILEILKRLLKALKEAAEELKKISEHHLRVSEKVVRDLDRVVKKIVDVARRVAT

SEQ ID NO: 13493 - protein, 233 aa, Artificial Sequence; identical to SEQ ID NO: 13492
  Synthetic

SEQ ID NO: 13494 - protein, 242 aa, Artificial Sequence
  Synthetic
SEKEKLLRDLEEVVRDVIRLSKESVDKLKETVDRLVEESRRTVEELRRIVDRVAKEVKSKEVLDKTRDIVRKVEELNERIIRAIEDLVRKVEKLNEEVIRAIEEVVRRMAELIRDKREDKERVDRVVKELADELRRVLEKYEKILRDLARELKKLVDEHRRVVRELAEELRKILKELKDKRGDDEIVKLLEDVVRELVEVLRKSTEVIERAVKKLVDILRESLKLIEDVVRRLVEIMEEIVR

SEQ ID NO: 13495 - protein, 242 aa, Artificial Sequence; identical to SEQ ID NO: 13494
  Synthetic

SEQ ID NO: 13496 - protein, 238 aa, Artificial Sequence
  Synthetic
SEIEDVIRRLRKILEDLERVSEKLLREIKKILDEARRLNEEVIKEIKRVLEDAVRVFRDIRERKEELRKLVEELIRELRKLAKEVDEIHKRIVERLKKLVEDAERIHRKIVETLEEIVRRVPREELKRVVEAIVEVIKEHLKVLKDVIRRIIKAIEENAETIKRVLEDIVRVLELVLRGEKRIEDLVREVERLIKRIEDSLRELEKTVRELLKRIKEASDKVREDVDRLIKELKEAAD

SEQ ID NO: 13497 - protein, 238 aa, Artificial Sequence; identical to SEQ ID NO: 13496
  Synthetic

SEQ ID NO: 13498 - protein, 246 aa, Artificial Sequence
  Synthetic
SREEIVATLEDLARKILEVVKKLAKEIEDAWREIERKVREILKRLEELWREIEDVVRKKVDSRVAEILETVVKRVVDITRRLIEEAERVVRELVDITRKLITILEEVVRRLVEIVREASKIDDRRELEDMLRKIREVVREVIERLKKLDEDVRRVVEEVIRRLEELNKRLEDVIREVKKRLEELELERELVKELVELLEEILERNTRVIKEIIDLLRTVIRIHEKIVEDLIKLLEELLRRLEEATR

SEQ ID NO: 13499 - protein, 246 aa, Artificial Sequence; identical to SEQ ID NO: 13498
  Synthetic

SEQ ID NO: 13500 - protein, 237 aa, Artificial Sequence
  Synthetic
KEKEDALKKLEDLARKSREDLERVLRKHKKILDKIEELLKRVLDEHKKIVDDILRKTGTESEILKELARLLREHHEALRRLIEELRRLLEEHHKILEDLAREHKRLLDELIKVVADGVDKDELERIIKELRERDKKLVDDLRKVSEDLLDAVRKLVEDLERISRELLRRVEELAKDIEEELAREVERVIKELLDKSKEILERIERAIDELLKVSEEILKLSEDASEELLKILREFAK

SEQ ID NO: 13501 - protein, 237 aa, Artificial Sequence; identical to SEQ ID NO: 13500
  Synthetic

SEQ ID NO: 13502 - protein, 237 aa, Artificial Sequence
  Synthetic
DEKEEALKTVERIIRDIVRRLRELLKEHEDIVREIERELKEVHEKHKRLVEKALEELGTEDDILRKVEELLRRHNEILEEVIRRVRELLRRHHEVLERIVERLRELMKRLLDVIRRGEPEDELRKILRELLETVKRIAEELRRLSKRLLDEIRRLAKELEDVSRDLERRVRELLKDLEDRLADLIRRAVDRLRDISREILKRLVEVIERLLEVSEKILKLVEEVIRELLRVVEEAAK

SEQ ID NO: 13503 - protein, 237 aa, Artificial Sequence; identical to SEQ ID NO: 13502
  Synthetic

SEQ ID NO: 13504 - protein, 251 aa, Artificial Sequence
  Synthetic
SVVEILAEVLKRLLDILRKLVDAIRDVVKKHVEVVEKLVRLHEEVLRRLVDILRKIAEVREGEAVKRLLEEARRVLEDILRKSKKINEESERIIEEVIERIEEILRRIEEKLKEILDEIRRAGIPESKKRIVDELVKLVREILKELKKVVDDWAEIVRRLDEESKRLNEEALKIVEDLLRKLEDLERKPVDEEILRRLVEEAKRLVAESIKKLRDLVRKIREAHKEAIKRLEEIVRKVEEIVRKVIDELRK

SEQ ID NO: 13505 - protein, 251 aa, Artificial Sequence; identical to SEQ ID NO: 13504
  Synthetic

SEQ ID NO: 13506 - protein, 248 aa, Artificial Sequence
  Synthetic
SDEEKLRRLLEEVRRLAKRVIDELERVLRESKRLAEENIEELDKALEEVKRLIDDVIKKLRDGARIEEVVEEIRRVLKRVVELLRRVSDDTRRILERNVELLERIVEKLERVLRRVVRVLEDVTREERLKELVRRVEELLKEVLRRVREIVKRLADLHRKVLKESEDLVRKVEEIAKDIVDKLRTTTDSETIERLLRELLKVLKEIVDRHRRIIERLLKASEDAVRELKKLIEETLRVLTDVVRRTET

SEQ ID NO: 13507 - protein, 248 aa, Artificial Sequence; identical to SEQ ID NO: 13506
  Synthetic

SEQ ID NO: 13508 - protein, 235 aa, Artificial Sequence
  Synthetic
SLVDELRKSLERNVRVSEEVARRLKEALKRWVDVVRKVVEDLIRLNEDVVRVVEKVTVDESAIERVRRIIEELNRKLDAVLKKNEDLVRRLTELLDKLLEENRRLVEELDEDLKRRGGTEEVIDTILELIERSIERLKRLLDELLRIVREALKDNKRVADENLKKLKEILDELRKDGVEDEELKRVLEKAADLHRRLKDRHRKLLEDLERIIRELKKKLDEVVEENKRSVDELKR

SEQ ID NO: 13509 - protein, 235 aa, Artificial Sequence; identical to SEQ ID NO: 13508
  Synthetic

SEQ ID NO: 13510 - protein, 229 aa, Artificial Sequence
  Synthetic
SKEERLREVAEKHKKDLEDIVKRVDEAAKETKRRLEEILKRLEEVLKKILDDLEKGPDDEKLKKVKKILKDIMDRLRELIKKILKLLKENLEKIKELLRRNLEISEELLKLAKDLRDRDVLETVRRVLEKLDEEWDRVLEDSRRIIETILRELDTLLREVEKLIKEIKDEIKDLKEVLDILERAVEVVRRVIKALKEVLERHVDATREVIERVKRVNKRLLEAVREVVT

SEQ ID NO: 13511 - protein, 229 aa, Artificial Sequence; identical to SEQ ID NO: 13510
  Synthetic

SEQ ID NO: 13512 - protein, 232 aa, Artificial Sequence
  Synthetic
SREEKLEELIKELERRLKDVLDRSRELNREIRKTTEEVIREVDRLLREIEKIVRDVRLPREIVELIDRLIKRLREILKEHKELVDEVIRRNEKSNRELVKLLEEALREARREGADEKLIRVAEELLKRIEEIIRRNEEIIKDLKRRSKRLLEEARRVVKDLLRRLEELLRRLDEDTARLVREVAELIEKVVREIVKLIDEDLKKLERVVRENARLLREVVELLLKVVRDVAK

SEQ ID NO: 13513 - protein, 232 aa, Artificial Sequence; identical to SEQ ID NO: 13512
  Synthetic

SEQ ID NO: 13514 - protein, 244 aa, Artificial Sequence
  Synthetic
DEKELLEEIIKKVEDLLRESRELWERLIKRVKELLKRSKETVDEILKRIKELLDELRKVAAEGAPEEELVKKIKEILETVKRLIEEHIRTNEEVLKEILELLKRIIERNRKVLEDVLKDVTDTGVPEEVLKELKKVIDDLERLNEEVLKEATEVLKRLLDINARVLEELDRVVRELEDLLRRLTDKRLLDVIKEIVEKLIEVVRKLLEADKRIIEELIRVLEKIAEVDETIVKRLIEVLKKIAD

SEQ ID NO: 13515 - protein, 244 aa, Artificial Sequence; identical to SEQ ID NO: 13514
  Synthetic

SEQ ID NO: 13516 - protein, 244 aa, Artificial Sequence
  Synthetic
SEEEDIERVLRELKKLHKDHLDLLREVVKRAEELLRRHLEILREVLKREKKLLKDVLRDARRREEAEEVVRRVEKELDRVLEDSERVLRELLERLKKVLEEIKRVHERVTRDLERVLRELRDVRSEEVAKLLTELLERSIRVIEESVRLSRRALEVLIRVIKESVDRLEELLRDLIRVLKELRDKGVITDELLEEAKKLVKEVRELAEETLRRLARLVEDVKRLNDEAVKRLRELVRRIKEEVR

SEQ ID NO: 13517 - protein, 244 aa, Artificial Sequence; identical to SEQ ID NO: 13516
  Synthetic

SEQ ID NO: 13518 - protein, 237 aa, Artificial Sequence
  Synthetic
RTEEILREIVDLLRRVAEENLRTLEELVELLDRVARRNLESLRELVRILEEVLKKLLKKDKDEELKRVIDEIKKVLEELIETLKRVIDESREVLKEIRKTLEKVIRETKKELERLIELLRRGVPVERLMEELKRLLDRHKDVIRKLNELLKRLLERHVKVVRDLNRALKALAEKIREDIRDEDVLRELDEVVRRVIERDREILRELKRLVEEVIRKNEDIVRKLEEAVERVLRKLKD

SEQ ID NO: 13519 - protein, 237 aa, Artificial Sequence; identical to SEQ ID NO: 13518
  Synthetic

SEQ ID NO: 13520 - protein, 239 aa, Artificial Sequence
  Synthetic
SEKEEVIKDLRKVLEEVLRRHEELVERLKEVLRKVLEDHKKLVEDLKRVLDEVRRKLENNADLETVIKELLEVIRRVLEDSNRVVEELVRAVEEVLKESIRVVKRLIDTVDELLRRLTRTEDVKEIVDRIRKKLKELLDTNRELVERVRKLLEELVETNRRLTEEVKRKVEEILKLARNGLDREELLRRLERIVEDIIRLLEESLKLAAEVIKTIIRLLEESLERLKRLVDDIVEKLRK

SEQ ID NO: 13521 - protein, 239 aa, Artificial Sequence; identical to SEQ ID NO: 13520
  Synthetic

SEQ ID NO: 13522 - protein, 243 aa, Artificial Sequence
  Synthetic
SEKELLERLEEVERRLLEIVRRLLKRNRDVHEELLRIVEANLRRNKKVHEDLLEKVRKSVRKEEVKKVIDEVDKKSKESLEELKRVIEEVKRLSEETLKKVEKVIKEVEEELRRVLDEARRNPDKDVLKKAIEVARRIIEELARVLKDDIDRLRELIKTLADVLKKDIDELRRLIKRLMEEERVDKVVKELEDIVEELMEENKDSLRRLKEIVEELLEENRRVLEKLRKIVEDVARELEETAT

SEQ ID NO: 13523 - protein, 243 aa, Artificial Sequence; identical to SEQ ID NO: 13522
  Synthetic

SEQ ID NO: 13524 - protein, 234 aa, Artificial Sequence
  Synthetic
SIEEVLREIVKLLREVLERLIRVDERLVEALKRVAEKNIEVLRRAVDALRKVLELLRRGQDKRDVDRELRRVLDEVKKEIERSIEELKRVLEEHRRRIRKIIEELKRVLEEARRKLKSERLLEKLTRLVEKTIRAIEKLHREWERILREHIRLLEELLKRLKELLDELRKLIEDGEDEETVIRRVEDVLRDLLRRLEEVVRRSTEEAKRLLKESRDVVRDVEKTLRELLEELRR

SEQ ID NO: 13525 - protein, 234 aa, Artificial Sequence; identical to SEQ ID NO: 13524
  Synthetic

SEQ ID NO: 13526 - protein, 234 aa, Artificial Sequence
  Synthetic
SVEEVIRKAVTDLDRVLKTNIRVDERLIEMLKRVADENREVLEKIVRLLKEVLDLLRNGRDERDVAKRLREVLEEARRDIERSIRKLEEVLRRHREAIKRSIDELREVLERLERKLRSEDVLRKLEEILREHEDMLRKLHEEWERILRRHIELLKRLLEKIKRLLEELLRLATEGEDEKEVVDKVKRVLDELRRDLERVVEESEKLARDLLRKSRDVVRRTRELLKKLLEEVET

SEQ ID NO: 13527 - protein, 234 aa, Artificial Sequence; identical to SEQ ID NO: 13526
  Synthetic

SEQ ID NO: 13528 - protein, 247 aa, Artificial Sequence
  Synthetic
SRRETLEKLLKEIEDLIRESLERLEKLLEENRTLIDDDERRVRELARDIKELIKEIEERLRRENVEEALKVVREVLRIADEAIKLHIEASRRVLELSRRLVEDHKRATKEVLELLRELIRRLIEVEERKEDKREVKKDVERILREIEERLEEVLRRNREIHEEIKEDLKRVSKEVRDLLREIKKTLEDGKVSEEILKIIEELIKRLEKLNEDSNELMKELVKRNERLARENLKLVEELLRRIEETTR

SEQ ID NO: 13529 - protein, 247 aa, Artificial Sequence; identical to SEQ ID NO: 13528
  Synthetic

SEQ ID NO: 13530 - protein, 234 aa, Artificial Sequence
  Synthetic
SEVERLRELVERWREELKKLLDELRKVVEEIARELKKINDELRKLVEDIAREARRETKKRELLKELLTRLIKLLEEANERVRDLLRRLLEIIDEILRRLRELSKRLIEEARRETREERVKRALEEVVRTSEEILRELKEILDRVREELKRINDDSRRIIKEVVDRLREILEKADKDDDERVIEELIRVLRKVVEDHADVTRRLVEVLRKVVKLIEEVLKKDEKVLRDIVDRLKT

SEQ ID NO: 13531 - protein, 234 aa, Artificial Sequence; identical to SEQ ID NO: 13530
  Synthetic

SEQ ID NO: 13532 - protein, 237 aa, Artificial Sequence
  Synthetic
SEVEEVVRVLEKVLRLLRRLVEELHRLSERVLELITRLLKELKDLSREVIKRLEDANIDDRVREKLKRVHEKLERVVEEVLRRIRTVNEDLKRVVKKLEEKIKKVIDELRRENASEEALRKVAKVIRDVVEEAKDVVRRHVEVVRDVIRLLEEAIESHVRVVRRLIEELLRKLAEERKKEKIDELRRVLERVEREHRRVIKKIRDVVEKVKRDHERVLREVEKVVREVRTELEKLRE

SEQ ID NO: 13533 - protein, 237 aa, Artificial Sequence; identical to SEQ ID NO: 13532
  Synthetic

SEQ ID NO: 13534 - protein, 253 aa, Artificial Sequence
  Synthetic
SVEEELRELVKRVEKLVERLRRIVKEIIERSRDLVRKSREVVDRLKKELDELVKEVVREEGEDSEVVEVIEKLVRLATRALELHIKSLEKHVKLNEEALRRLIEVIEELVKLIREVVKELLRITRRGEPEEELKRIVDRAKEEVKRVLKKLREILEEWKKKIRESLKENKTIVDKVKRDIERVLEELEEAKVASDEVIRRIAEVVKRLIDKLKELSDDNRKAVEDHERLVRKAIEELVREVEDILRRIDETAR

SEQ ID NO: 13535 - protein, 253 aa, Artificial Sequence; identical to SEQ ID NO: 13534
  Synthetic

SEQ ID NO: 13536 - protein, 241 aa, Artificial Sequence
  Synthetic
SEKELLKEILDRIRELLEDDNRLLKRIVDEIRKLLEEWLRVHKEILERIKELLDRINAPEDVIRELTRALKETEEDVDRVIRTLEKLLKEVLDRHEEVVRKLDRLLKEVERLVEERDAEEVVRDLLRVVKEILDESKRVIDELARVVDEILKLLEEVDRKLAKVVKEILEDVLRAKKDDEDMVRKIRKIIEELKRLLEDLRRDTRRVIEEAKRLLKEWRDRNKEVADTLKKLLEDLIRKIR

SEQ ID NO: 13537 - protein, 241 aa, Artificial Sequence; identical to SEQ ID NO: 13536
  Synthetic

SEQ ID NO: 13538 - protein, 242 aa, Artificial Sequence
  Synthetic
REDEIVEDWRRLLEEAKRRSEEVAKEIRDRAREVTKESKRVADEWRRLLEEVKKRAENIDERVLKLIDDNIRDVERIIRRHEEIVKTLIRLLEEILDRHRRLVERNIESVDRLLKAVKNGEPIEELVRRIEDLSRKLVETNRKLSEELKRMAKKLLDENRKLSEELVKRSRDVVKEIEDGGLGEELVRVARDLVRLNEEVLRKSNRSVEELLKALARVLDRSNKSLEDLVELNKRVLDKLRT

SEQ ID NO: 13539 - protein, 242 aa, Artificial Sequence; identical to SEQ ID NO: 13538
  Synthetic

SEQ ID NO: 13540 - protein, 242 aa, Artificial Sequence
  Synthetic
RKEDLVREWRELLRKILEDLEDLVRKWRKLLKKILDDLRELVRRVREELDKALRTVEKGELDAEEVLKELERLVEEIIRAVRELLKRLSDLNKKVLDELRRLVERLSKLNKEVLDKIREEERSRKIEEILRELEELNRRSLKKLEKILKELDEADKRSLKEVEDVLEELKRRIREILELMKAGKDLRDLVRKIIEIIEDILRLLEEVLRKNVKAVEEVLRLAIRVLEENIEAVEKVLEDVRR

SEQ ID NO: 13541 - protein, 242 aa, Artificial Sequence; identical to SEQ ID NO: 13540
  Synthetic

SEQ ID NO: 13542 - protein, 243 aa, Artificial Sequence
  Synthetic
SEEELLREIEKILDEVRKLVEKLLEDNRRLADELIKLIKELLDRNLRLIERLLELLERGTDADELVKEARRMLEESKRLVTELVKTVEDVLRKSERLVEELERRVRELLKRLKDLVRETGGDKLKKVIEDLERVLKELLDALREVVKRSVKVWRDLLRALDDVVRRSVEVVEELLRVVKETGPGEELREVLERALRKAKKIHEDLKRIVEDVRRRNDEILKDLERVLKEVEDKIRKILDELRK

SEQ ID NO: 13543 - protein, 243 aa, Artificial Sequence; identical to SEQ ID NO: 13542
  Synthetic

SEQ ID NO: 13544 - protein, 235 aa, Artificial Sequence
  Synthetic
RDEDIKRELVRLVEEILRTSARLLDESIKSNKKTLDDIERVAREIVREIEELLKRIADGNKLDEEVLRRLVEKIRRAIEEVERLLERLKEKIKRSIDDLKRVLEETARRLEDVLDKVRKDEDKDRVVERLIKVIREVLELDKRLSEENLKVLKEVLDLVETVAKRLIDVLKEVADDIKDADELKKDIRDVLERVKRIAEELRELVERDIREDKRLLDELAKLWRDLLKMIEDLRR

SEQ ID NO: 13545 - protein, 235 aa, Artificial Sequence; identical to SEQ ID NO: 13544
  Synthetic

SEQ ID NO: 13546 - protein, 248 aa, Artificial Sequence
  Synthetic
SEDELLEKIVRKLREAVKRIEEELRKSKREIERLVKEIKEKLEDSLRRVKETLDRIRETRKKPQDEEVLERLVRTLEELLRRHLKLIEDIARELKKLLKEHLDRIETIVRDLKRLLKEILDELERTGLPREVLEKVRELVKTVARLLDEVLKNNKKLLDDLKKELDDVLKNNKRIVDELRRLLERVRRRKEDLEELLRLLKEVIERSIESLERLLELILRVLEYSVRSLEELLRRLLEVIKRIVDTTK

SEQ ID NO: 13547 - protein, 248 aa, Artificial Sequence; identical to SEQ ID NO: 13546
  Synthetic

SEQ ID NO: 13548 - protein, 237 aa, Artificial Sequence
  Synthetic
DEDEIAEELKRLLREVEEKSKEIVRRMRELAREANKKSEDILRTLEKLLEELRRRVEENRRSSKAVLDKIREVLETLKELLDRHHETVRDLVRRLKELLDRHNETVKKLVEDIKRLLDESGGRREIKKRLEDALREHNRIIKEIKKLLDKVLKDHKDILDDIKKKLDDVLREVTEILKRNRIDEVVRRIERVIREVIKILARANKRLHDVVEEIIRLLEEVTDELRRVVEEVIRRTK

SEQ ID NO: 13549 - protein, 237 aa, Artificial Sequence; identical to SEQ ID NO: 13548
  Synthetic

SEQ ID NO: 13550 - protein, 238 aa, Artificial Sequence
  Synthetic
DKEEEVRRLIEENLKKIEEVIRELEKIIRDNLRKLEEVVREIEEELETTLRLIETDGVSEEVLREVLKRVEDIMRKLRDVLREVRELHEDVLRKVEEVLKDVKRLHEEVLKKLEDGLDLTKVLEELRRINDKLLKKVKRVLELLEEINRRALELVREVVERLLRVIERLIDLLRRSGVDEDLLRKLKELLETLKRRIDEIEKKLEEILKETKDLIRRLLEKLKRIDEELRKTLEDLRR

SEQ ID NO: 13551 - protein, 238 aa, Artificial Sequence; identical to SEQ ID NO: 13550
  Synthetic

SEQ ID NO: 13552 - protein, 242 aa, Artificial Sequence
  Synthetic
DDIDEILRRLREEIEDARRKLEKILRELRERIKDYKRKTDELLKESRKRIREAEDRVRRDGARDELMRKLSKEDEELTERLVRTHEKALEDLTRAVERLLRLLKELLERLKRILEEIRKRGRVPEELVKRLREVLKEVERRVEEALKRVKDVLDKSKRDLEEAVKRNREVNKKLRDEVEKRRDDKVLEALLEKLLRSNEELVKIDRDLLRDLLRVLEELIKTVRDLLRELLRVLEEVAREIK

SEQ ID NO: 13553 - protein, 242 aa, Artificial Sequence; identical to SEQ ID NO: 13552
  Synthetic

SEQ ID NO: 13554 - protein, 242 aa, Artificial Sequence
  Synthetic
REEETLRDIERLLRKLLEELKRTADELIDSHRKLIKKLKEILDRLRRSHEKLIETLRRRLTDEEVLKEIIEVNKKVLDDVTRILEEIERLNKRAIDRVKEILKRIEDTLRKVLDDVRKDKDKDRVLDKILDVLRKVVELLKRVLDESARVVEEVLTLVKEVLERSLEAVEESLRIVERRLSDKEDVKRELREVVKEHKEDLDRIKKELKELLDRHTETLKRIVKKLRDLLEEIRKALEDLKK

SEQ ID NO: 13555 - protein, 242 aa, Artificial Sequence; identical to SEQ ID NO: 13554
  Synthetic

SEQ ID NO: 13556 - protein, 232 aa, Artificial Sequence
  Synthetic
DEERVVEEAIRVLKEVLDLHRELIKRSIDVLKESLKVHERAVESLERVLKEILDLVRRGKREELDRVIRRVMEDLKRVHEELREIHEEVIRRLDEVHRRLKKVIDRLKTRLREELRIEKRLRDAEEILDRLYRENERVLRTLKKLHRDHYETNRRALETLLRLLEETEKLDKSGTKEEEVAERVKRIIEEVRKLAEDSRRKTEELIRRVKELAERTDETVRRVIEELRRRTK

SEQ ID NO: 13557 - protein, 232 aa, Artificial Sequence; identical to SEQ ID NO: 13556
  Synthetic

SEQ ID NO: 13558 - protein, 232 aa, Artificial Sequence
  Synthetic
DEEDVARKLIEVLKELLKLVEDLIRTNIRVLEESLELHRRLIEEIEKVLKRILELLEEGRREELERVARELLKELDRVHEELKRVHEEVIRDTDRVLKEIEEVVRRVLKELREEVRIEEKLRDMERILRKILEDIRRLVKRLKKLHEDHYRTNEEVLRETKKILKRTLELVRSGTDREELAKEVKRVIEELKKLARESAEESKRIIRTIEELLREARKRAREVIEELKERTR

SEQ ID NO: 13559 - protein, 232 aa, Artificial Sequence; identical to SEQ ID NO: 13558
  Synthetic

SEQ ID NO: 13560 - protein, 237 aa, Artificial Sequence
  Synthetic
DAEEVLRLLAEVLERIIELIKKVNEILIRVLREVIRLIEEVNELVREVLKRIIELIRRDIDDEDVRRLVERIKTVAEELHKEVRKLVKEIEDLARKSNEDVRKLVKDIRRVVEELKRANLRKDRLAEAVEDLLRRILEAIKRHLRKAEEIIKRILEAIREHLKKLRELAKEIKDAARKAGVDERILEEIERLVREVEEIHERVLRRLKELLKKVREVHEEVLRRIERLAERVREALK

SEQ ID NO: 13561 - protein, 237 aa, Artificial Sequence; identical to SEQ ID NO: 13560
  Synthetic

SEQ ID NO: 13562 - protein, 239 aa, Artificial Sequence
  Synthetic
SVREELEKVIREVIEEVERVLERIRDELRKSLERLKEVIKRIEDVHRDLIRRIREIKDLEKVLRLVLDVLKKVSDLTRELLRENLEVLEKIAKLLEDLARSLLKVIRRLLEILIREFKDDEELLRRLKELVDKIRKILRDLLERVKEVVDRHRKKLEELLKRDEDLLEEVKRRLDDIRRENVPIEEVLKTVEDISRRHRELLKRILDTSKRSIEETLKLAREILETLKRLLKELLDAAK

SEQ ID NO: 13563 - protein, 239 aa, Artificial Sequence; identical to SEQ ID NO: 13562
  Synthetic

SEQ ID NO: 13564 - protein, 240 aa, Artificial Sequence
  Synthetic
DAEDEARRVIDEAVDRLRKAVEEIAEVARRHLEEVEEVVRKLEEIIRESLERVRRASEAREDRALEKIATELRKLNEDVRRELERAAEESRRKLEELRRRLDKVVKDLRELLKRLRDSGDVAGEVLEALKRVIDTVVRLLEEVLRRLAEISEEVLKLLREVLEKHHDVTRKVVDLLRKVRRDKEAEEVVRRVERLHEDVLRRLKEVVKRVKELHEEILDRLREILDRVRELARKVREDLR

SEQ ID NO: 13565 - protein, 240 aa, Artificial Sequence; identical to SEQ ID NO: 13564
  Synthetic

SEQ ID NO: 13566 - protein, 233 aa, Artificial Sequence
  Synthetic
SEKERLSKIAEDLIRRLEEELERVERTHERLLRKLEELLKKIEKEYRDAMRKLETLTGVSERTLEELVKELIDISRKIVKRLEETVTELREINDRLVKRIEDLIRKLIEDLTREVEKKEVLERISRELEEVIKRLRKVVDESRRKIEEVLEELRRAAEESTRALEEVLKELKRGKDIKEVLDDLKRVLERDLRAIKKIVKELKRILKENLDVLREIVERIKRVLEKILREVEK

SEQ ID NO: 13567 - protein, 233 aa, Artificial Sequence; identical to SEQ ID NO: 13566
  Synthetic

SEQ ID NO: 13568 - protein, 248 aa, Artificial Sequence
  Synthetic
SREERLERVLERVKRAIDRYRDMLRRLLKTVEDLIRKYEEDLKRLLKEAKELIDKVKEENKDVEEVKRVLEKLLKVLEDLVRKVRKSAEDLREIVKKLVTDVERSLELLLKIVTELVEAAKRTETKEALDKVLTEAKKKVDEVLERSRKVLEDVRKELEEVLKHSEKVLREAKKELEKIIKEVEDAGTDEEIKKIIDRLREEIERILDELRRLNEELVETLRRVLETLRELNERLVKLLRDLLREEKK

SEQ ID NO: 13569 - protein, 248 aa, Artificial Sequence; identical to SEQ ID NO: 13568
  Synthetic

SEQ ID NO: 13570 - protein, 246 aa, Artificial Sequence
  Synthetic
DEEEKMKKIEDVARRYKEEVKRVLDDLERLLRESEEEVERIVRKLEKLARDLEERVRELTKKEVVERLVRELLKAIKELIDVLRDVVRLSAEVIKELLDVLRELVELNLRAIKEIIEVLKKLKSEEVKKRLDEILEKIEKVNTDVNRRLKEIIRKLREIHEEVLRELDKILRDIERVVRDVERRIDDKEVIDALKELLKVLEDLLREIKEALTRNLEKIDELLKLLHELSRRVIEELRKLLEDLKR

SEQ ID NO: 13571 - protein, 246 aa, Artificial Sequence; identical to SEQ ID NO: 13570
  Synthetic

SEQ ID NO: 13572 - protein, 241 aa, Artificial Sequence
  Synthetic
REDEELARKAKEVLKETEDLLRKLEEEVKRVLEEIKRMNREVREKVKEVIKELRKRLKDLREVLKELEELLEELLRSDTEVSRLLEEIVTRVLRVLEKVVRESKKAVDKILEVLKKVKGKDVVKLLKDILREIEKVHREVLKELDDLVREVEKILRDNIETLRRILEKIRRILERVAREKDDKRLLDLLRDLLRLLKELLETLEKLNERTLKLLRDLLRKLKEALRRNLKLLRELVDEAAT

SEQ ID NO: 13573 - protein, 241 aa, Artificial Sequence; identical to SEQ ID NO: 13572
  Synthetic

SEQ ID NO: 13574 - protein, 237 aa, Artificial Sequence
  Synthetic
SKDEIIKRIKDELEKLVRDVERLLRESERRIADLVRRVREILEESKRRVDELVKRVKETGNTEELIKTIKDLLRRNLEKLRRIIEEIKEVLRENNELVDRTLKRIKDLLRELLEMIRRAEIDEERLRELEEILRRVLDTLRRLAEELHETSKRVLEELDRALREIEEIHRRVLKELDDTGDVETILRVATEVVKESATVLKRILETLEEALKRNVRIIEEMLEILREVIERIARKLK

SEQ ID NO: 13575 - protein, 237 aa, Artificial Sequence; identical to SEQ ID NO: 13574
  Synthetic

SEQ ID NO: 13576 - protein, 230 aa, Artificial Sequence
  Synthetic
SEEEILREIKRLLEEHLELNERILREIKKDNKRTLKELRDIVRELKEILERIKRRIRIKSEKAKEVDKIIREVERRIDEVLKEIERLIREDNKKLDDVHEESEREIRRVIKDADRTDDLKTVVDEVRKVVDRDLKLLEELSESNIRVLEEVLRLLEELLRILEEVLKEILKASESEELRKLLEDARRALERILRRLAKIVKEIKEKHEEVLRRLEKSVREIDERLRRARE

SEQ ID NO: 13577 - protein, 230 aa, Artificial Sequence; identical to SEQ ID NO: 13576
  Synthetic

SEQ ID NO: 13578 - protein, 247 aa, Artificial Sequence
  Synthetic
SELERLERLLKEIVEVNRKALEDLRRVLEETVRRDREVLDRTRRKLEEIAEEILRELKNVKEVRDAVKELEETLREVVRRSEELLERLREIVDRVVKEVEDSNRETEKKLRDVVDAVRRGRDDKTLVAEVIEVILRDLKRNLDLLERLIRVTVEVLERSLELIKRVIEVLRRVLKRVLDIVRERRKERREDLKRLEDLVKRIEEELRRKLEKYERELRDLKRKLEELLKRYEEKVKELKRKLDEALK

SEQ ID NO: 13579 - protein, 247 aa, Artificial Sequence; identical to SEQ ID NO: 13578
  Synthetic

SEQ ID NO: 13580 - protein, 238 aa, Artificial Sequence
  Synthetic
SEEEILRRIAEEIKRLIDEDLRLIEELVRKIKTVAKRDLELIARLVEKIEEVIRRSIRVEEVVRELKKKLDEILKRVEDVVRESKKRLEDVRRKVEEAVKKSKEEIERILRRAEEGTDKKKIVEDLERVLKDHLDMNTEVVKDLKKILDDHLDANREVVKRLKEVLDDAVRVLRERIEDEEELKTAEKIIEDIKKEIDDVHREVRRLLEEIKEDIDRVNEEVKKRLEDIIEKIRRAAK

SEQ ID NO: 13581 - protein, 238 aa, Artificial Sequence; identical to SEQ ID NO: 13580
  Synthetic

SEQ ID NO: 13582 - protein, 245 aa, Artificial Sequence
  Synthetic
SIEELAEDIKKILDDALELLERLAKRAKEINDEILDELRKLVEKNKRDLDRALEKLRREGIPKEVLDELEKAVEDLKRDHDRVLKDLKKVADENKKTIKKVLDDLKRIIDEVKRMIEDLLKRLEDSKRVLTEILKVLKRLVEEIAKLLERLLESDKRVIEEIIKLLEDLNRALEELIRIIAEKIEDTERVRKLIRELEEELKDNRRLIEELVRRARKVNKRLRELVEEVIDRLRELLERIEEKIR

SEQ ID NO: 13583 - protein, 245 aa, Artificial Sequence; identical to SEQ ID NO: 13582
  Synthetic

SEQ ID NO: 13584 - protein, 234 aa, Artificial Sequence
  Synthetic
SKEETLRKEAEDLLRRLEELTRRLEKKARELLERAKKLSRDLAEELKRLLKELREKDVPEELIKVLEEVAKTSIDLNKEVIDVIRRVIEESLELNKRVLDVLRRVLDIAARKGRDKKAIRDVVREAARVIKEVIDEDEKVNRDLKRVIERVIDDDRKALERLRKAVEEVASRLDDERLKRLVEELLKAVTDLSRKNKRILEELLKAIETLSDENKKILTEILDALRRLVEKIEK

SEQ ID NO: 13585 - protein, 234 aa, Artificial Sequence; identical to SEQ ID NO: 13584
  Synthetic

SEQ ID NO: 13586 - protein, 241 aa, Artificial Sequence
  Synthetic
DEERKIVETLHRTSREVIKTLEKIVRDLKEVLKKNLELTERLIKRVHEVSREILRLTRENKVDEKDLERIHRELEKEIREVLEKSERDARDLLRKVERAIEELRERHKRVLEDLRRKGVPEELIRIFADLVRANTRVLETLLRILKELVDRSRDVLRKLIEIVEELARMNKEVLRKLKERDDDRVKKELEDANREVNKKLEEVLREIRELHKRVLDRLDEVLRRVEEINKRVNERLDRTAK

SEQ ID NO: 13587 - protein, 241 aa, Artificial Sequence; identical to SEQ ID NO: 13586
  Synthetic

SEQ ID NO: 13588 - protein, 242 aa, Artificial Sequence
  Synthetic
SEVEDLKRKLEEDLERHKKDVKRLKDEAERRLEEHKRLVEELERRIKKLLDELKDRNPEVKELLRVVKEIVELIRRVLEKHLKLLEEIIRLLATVLDKHLDVLREIIRLIARVLDLKEAGLDEEDLKREAEDIARKAEELLRDSARTAEDIARRAEEALKESKDDLKRILDRARELLDDIRRKKVVPKDVLRDLERILTELAKALKDLIDNSRRTLEKLLKALRDLIRESKETLEEVLRRTD

SEQ ID NO: 13589 - protein, 242 aa, Artificial Sequence; identical to SEQ ID NO: 13588
  Synthetic

SEQ ID NO: 13590 - protein, 240 aa, Artificial Sequence
  Synthetic
KEREEVKEKLDRLLEEVEKTVRELKREHDELLKEVEKLVRDLKKEHDELLKKVKDDGVPKEILDVIREHVRTNKEILDRVLEVVEEHLRRNKEILDKLLDDIRKVVEDAKRILEIDDDETLRRAVRRILEELRKLVEDIRKKVKDSLETLERALEEAEERIRRSLEDLKRVLKEAKDKTKDKDRLDKVEELVKKLLEDTKRTVDRVRELVRKILKKSRETLEELERLIEKILRELEKDAR

SEQ ID NO: 13591 - protein, 240 aa, Artificial Sequence; identical to SEQ ID NO: 13590
  Synthetic

SEQ ID NO: 13592 - protein, 240 aa, Artificial Sequence
  Synthetic
SERETVKRRLEELLKEVKRTLDKLKEEHDRLLEDVRRVVEELKREHDKLLKEVKDSGVPEELLRVIAKVLETNKRILDDLLRVVKKHVDLNKEILDRILEMIKEIVERVKRVLEDDDEKTLRDKIRDIIRRLEDAAREAEERVRRSLEELKKAVEKIRKKIEDSLRELEEALKRVRDKEEDDKRLEDISRLVKRLLDESRRVLRELEETIRKRAEESKRVLEEVKRLVEKLIRELRKEAE

SEQ ID NO: 13593 - protein, 240 aa, Artificial Sequence; identical to SEQ ID NO: 13592
  Synthetic

SEQ ID NO: 13594 - protein, 239 aa, Artificial Sequence
  Synthetic
SEDEIIKKIIEDLRRVLKEVEEIHKEVEERLDKVLKEAEEMHKEVLKELDRVLDEVKRIEDVETVLRLAIEAVRRALEIVRKVTEDLIRVVRKLLEIVDRVNKRVKKAVEDVLKLLRDTLKGSKDVERVLDEARRLLEKLHRDSRRILKRIKELLDELKELSERILERIKRLLEEVERRNSDDERLLEELIEELKDLIRRHIELLRRLIERLKELLKKHIEDLRRLLEEIEKLLEEARK

SEQ ID NO: 13595 - protein, 239 aa, Artificial Sequence; identical to SEQ ID NO: 13594
  Synthetic

SEQ ID NO: 13596 - protein, 241 aa, Artificial Sequence
  Synthetic
SREDEVRKVVEKVLRDSKRSMKELRDVVTEVLKKSKEVLRELKEAVDRVLKKLKDISRDVKSSDVVRELLRVLEELLERLARVLEKNLRINEELLRRLERVAEKNLKINKDLLKALADAERSEEAEKLLREYKKLVEDLARKLRRLLDEYRKLVEELEKRARELLEEIKRLIEDIKRKLERDGPSEELVKELLEFLKRVLEKAERLVRKNLEDNKELLERLERLIEENLKLLEDLLRRTEK

SEQ ID NO: 13597 - protein, 241 aa, Artificial Sequence; identical to SEQ ID NO: 13596
  Synthetic

SEQ ID NO: 13598 - protein, 251 aa, Artificial Sequence
  Synthetic
SEEEKLRELKEILDRTLKKIEDLIEESKRLNEEHVRLTREILDEIRRLLEELLRKLREAGIRDEEIETVFKEIKELLEEVLRRNEDSVRRIRKAHEEILRKLEEIAKRIRKLLDDVLRLLRGGRDRKDVLTDLLRVIKEALDALKKVLDDLHRVNEENVRLDKESLDRLLEVIDRAIKKIKKILKKAEERLSEEILKRIEDTLKRLKEELKRLVDEVRKHIEELLERSERLIRELRRTLEEILKRLKEKTD

SEQ ID NO: 13599 - protein, 251 aa, Artificial Sequence; identical to SEQ ID NO: 13598
  Synthetic

SEQ ID NO: 13600 - protein, 245 aa, Artificial Sequence
  Synthetic
SAAELVLELLARVVKLLEEVLKRLIDLHRDVLKKIKDVLDRDHELHERVLRELVKVLREAERRDEETVRRLLEEVRKAIERVLEESKKRLDEVVKDSRRVLEEVKELLRRVEEDIERVLREVKRSNNVEERILRDLEELLRRLIELLRRLLEEVRKINEEIIRLLEKLLRRNAEILRTLLRLAERDIDKREELEKRLRETLDEHRDLLRKLKEFLDRSLEDLERRVDEVRKELERVLEELKRKLK

SEQ ID NO: 13601 - protein, 245 aa, Artificial Sequence; identical to SEQ ID NO: 13600
  Synthetic

SEQ ID NO: 13602 - protein, 239 aa, Artificial Sequence
  Synthetic
KEVEDIERVLRKALELSKKVSDDLERVLRELLKLSKEVIEKLVRVLEEILELLKRENIGEDELLRRLEKRVRKIIRDAERTLEETKRELDRIIEESRRLNKRTAEDLKKLIDDVKRTRNDEEAIERLVRLIEKNLRLLEELVRRLSRLLEENLRKLEDIVRRIKELIKETLKLLEDAGVPEEDLRRVRELIKKVLKDLERVLKEAEDLHREVLEKLKDVVRRAAEMHEEVIRALKEVSR

SEQ ID NO: 13603 - protein, 239 aa, Artificial Sequence; identical to SEQ ID NO: 13602
  Synthetic

SEQ ID NO: 13604 - protein, 240 aa, Artificial Sequence
  Synthetic
DEEELLREIKTILDESLKALEELIRKIMRILDKSLKDLEEIVREIKKTIDELLEKVRRSGLPEEVLKKVKRVAEKVKEDIDRLLEDVERSHREVKKKLDELLKEVKRSHEEVKKELDSLRRDSDRDTVAREILRVLKKNLDVLREVVEKIVKVLEDNLKSLKRVLETLVDLLRKLIKVLREAGLREEALDDLRRLVKELKDKLRKLLKDYKDLLKELKDEAKKLLDDYRRLIEELEKKAR

SEQ ID NO: 13605 - protein, 240 aa, Artificial Sequence; identical to SEQ ID NO: 13604
  Synthetic

SEQ ID NO: 13606 - protein, 236 aa, Artificial Sequence
  Synthetic
SEKEKLDELRKLIEEIERELDRLLEDNKRAVEKVLRDLDRLLKKSEDDVRRVEEELDKDRVPEDVKRIIRRLLEVHREVLELVKTVIRRNLKVSEDLIRKVKEAVRELLEVIEKLKSREVLKRIREIIEKIKEILERALEESKRSIEEIKRIIETVDRRVKEIIKEVRDVIRRDVKDKDLAERIRKILDDLLEVHERVARAIEELLRELLEKNEEIVRTIKKLLKRLLDTLRKAAE

SEQ ID NO: 13607 - protein, 236 aa, Artificial Sequence; identical to SEQ ID NO: 13606
  Synthetic

SEQ ID NO: 13608 - protein, 235 aa, Artificial Sequence
  Synthetic
SKLETVIRILEELVKVHEELLRIVKKILEELVRVHRRVSEENLRLWKELLDALREDKGREDERVERIIEKAERLLREVAKRHEESIREIDRLLEEIARRAEESLKKIRDLLRKVKELAERGDSEKSIEDLVRTLIELHRRSVEEIRRLLEELVRIHRESIKEVEKLNEDESRELRKAGISEELLKRVEDVNRESRKVLEESLRRVEEALEKIERALRKSEEDIRRLMEDIKRVLK

SEQ ID NO: 13609 - protein, 235 aa, Artificial Sequence; identical to SEQ ID NO: 13608
  Synthetic

SEQ ID NO: 13610 - protein, 236 aa, Artificial Sequence
  Synthetic
SREEKIEKLIRLVEELLERLRELLERNAELIKRLLDRLRELLKELERLNEELLKKLLEKVDDEDLRRVLEEVKKSLEEVREKLERAVKEVKRLVDESRESAREVVKTIRDLLRKVRESEDKRDVVRVIEDIARLLDEILKENRRVNEEIVRLIRDVLRVIREVVKTNADLLREILRRAGGVRELEELIKKVERDHERVIKEVEKLVKELLDRSEEIHKRAKELIKEVLDRVREAAR

SEQ ID NO: 13611 - protein, 236 aa, Artificial Sequence; identical to SEQ ID NO: 13610
  Synthetic

SEQ ID NO: 13612 - protein, 237 aa, Artificial Sequence
  Synthetic
SREELLDRILEAIAKILEDLKRLIDENLRRLEEVVRELERIIDRNLKLIREILDELKKRGAREEILEKIKKVDKELEDLIRRLLKKLEDLIRETERRLREILKRIRDLLKEVKDRDKDLERLLEVLEEVLRVIKELAKELLDSLRKVLKVVEEVLRLLNEVNKEVLDVIRELAKDGEGDEIIRKLDELLKEVEKVHKEVKDRIRKLLEDHKRSLDEVKKKLERLLERAKEVVEREKK

SEQ ID NO: 13613 - protein, 237 aa, Artificial Sequence; identical to SEQ ID NO: 13612
  Synthetic

SEQ ID NO: 13614 - protein, 246 aa, Artificial Sequence
  Synthetic
SEREELLERIKEILKRVKDKLDEDLKRLKEILEKLKEKADRDLEELRRRIEEVREKLERTGRTDELVKEVLDTVRRNLENLKRLVEDILRKLEENVKNLTDLVREILKLITELIKRLEDGGLPKEVLDALRRVLEKLEELLREILERLKRSLEKVKRKIEELLKELERSLDELRRALERIRKEIKDSETAVRAIIRVLEKHLEAVRRVLEELLKVLAEHLETVRELIERLKRVLEEAIEVVERVAR

SEQ ID NO: 13615 - protein, 246 aa, Artificial Sequence; identical to SEQ ID NO: 13614
  Synthetic

SEQ ID NO: 13616 - protein, 240 aa, Artificial Sequence
  Synthetic
DEERKLKELLDRLRENIRALRELIKDNLRLLKTLVDALEELLKDNLRLLRELAEEAARRLSEDALRDLKRVLDELKKVHDRVRRELERVLKELDEVHKEVKERLDRSLEELEDVIRKVKDERALLEALKKHVDVVRTVLKLLLDANKRALDVVRALLELILTVNKKAVDVLREILKRVVKNEKDVRELIKRVETALRESEEKLRRVAEELKKALDRSRKDLEEVVRRTEDLLRRLEEKLR

SEQ ID NO: 13617 - protein, 240 aa, Artificial Sequence; identical to SEQ ID NO: 13616
  Synthetic

SEQ ID NO: 13618 - protein, 240 aa, Artificial Sequence
  Synthetic
SEEETVRRLLELLKENIEELRELLKRNLDLLRKLAEELKKLIEELARITERLAEKLAKDLSEEVLKELEDVLRELKRVVEEVKRRLKKVLDELREVHKELKKELDKSLEELRKKLEEVSRKEDLTRALADHVRVVKEVLDKILEVNRKFLEDVKDLLRLLLEALEKALKELERLLRRVVDKEEEVRKLVEELRRAVKRVRDLLDELRRRLEEALRKSKRELETIEERTRRLLEDIKRDLD

SEQ ID NO: 13619 - protein, 240 aa, Artificial Sequence; identical to SEQ ID NO: 13618
  Synthetic

SEQ ID NO: 13620 - protein, 242 aa, Artificial Sequence
  Synthetic
SEEEEIVKRLKELIKRNLELLDKTLKELKKTLEDIIRTLTELVKRAKEINKELIDRLREKGVREEAEKKLRRSDEKLEEVVRRVKEKLKRALERLEEAIKRAKEKIKRSIEKLDKLVKDLRSEEMKRALKEVIDEHIKILRDIIRLLEEVVETIIRVLREAIKLLEELVERNIRVLRDIVRADKLEREDIRRYEEKLRKLVEEVKKKLRDLEERLRRLVEKIRKLLEDSERRLRTMLDEIRR

SEQ ID NO: 13621 - protein, 242 aa, Artificial Sequence; identical to SEQ ID NO: 13620
  Synthetic

SEQ ID NO: 13622 - protein, 246 aa, Artificial Sequence
  Synthetic
REKEEKVKKVREVVTELKRELDDMLRRVKEAHERLKKKHDDLLKEVREVHKRLKDRLDERGGDEAIKEVLDRHLKLVEEVVRANKEVLDRHLKLVEDVLRALKEVLDKVLKLVEELVRRRDEERAEDLVRRVVKEIDKLVKEIRKRLEDVSRDVRRLLDELRKINKRVSDEVKRLIEELRKRLSGGDEEIKKTIEEIIKVLRELNDKLRRLSEDTIRVLEELNKEIARLLEKLVRDTKRLLDELTK

SEQ ID NO: 13623 - protein, 246 aa, Artificial Sequence; identical to SEQ ID NO: 13622
  Synthetic

SEQ ID NO: 13624 - protein, 247 aa, Artificial Sequence
  Synthetic
SVKEVIKEVLDRVVKLIKDVIDALKTVLDRHLRLNRENIRALLEVLERILELLEELVRKSTDDRAEEVLRRVVTKIRELLERIKRESDKVSEKVRRLVEEIRRILKEAVDRIKKLVEELRKALEGIREEIADKLRKIEKKIKRILEELRKMLEELARTIEKLNKDDEDTVRKTVETIERILEEETRSTDDLEKLLRKVRKIAKELADELRKLHREVKETHEDLKRKLDKLLKDIRKVVEDIKREVDR

SEQ ID NO: 13625 - protein, 247 aa, Artificial Sequence; identical to SEQ ID NO: 13624
  Synthetic

SEQ ID NO: 13626 - protein, 233 aa, Artificial Sequence
  Synthetic
EKEELVEEILRRLKKMSERFSRVVEEILKLLEDSSRKVEEAIRRTIRELEKTLKRVEKDGKTDELLRDLKRVVEDIKRKLEELLRDHRRILEEIRRKLEELHREHKKILEEISRRLGTEDELARLIIEVLRKNNKALRDAAERIREVLKENHDALKKVVEDIVRVLEEALEVLTKLDSRELREAVKKVIADLEKILKDLRKLDKESLDKLREILKTLRDLDRKSLEELEEIRR

SEQ ID NO: 13627 - protein, 233 aa, Artificial Sequence; identical to SEQ ID NO: 13626
  Synthetic

SEQ ID NO: 13628 - protein, 245 aa, Artificial Sequence
  Synthetic
SREEKLREDLDRVFRKNEEELKRVEKEVKKLLDDSKRKLDEVKKELEDLLEKIKRLLDRPGTAELVERLIKELKDTLEKLADLVRDANRLIKELLDRLRELAERVNDDTRKTLETLERTLDKDDVIRKLREDVTRVNDENRRVVEKLDELVRDVNRRNEEVLREAKKRIDEVIRELEEIKRDRKDDEELLRALKEVVRKVIEIVRRLLELHRETVKELARVIKEILRLHLESIKKLLDVVREVLR

SEQ ID NO: 13629 - protein, 245 aa, Artificial Sequence; identical to SEQ ID NO: 13628
  Synthetic

SEQ ID NO: 13630 - protein, 237 aa, Artificial Sequence
  Synthetic
DEEEKVRRLKELLDRTLKKLKELVEEHDKILDELLKKLEELVRRHNKLLDDLLRRVEERGLDEEVLRRLREVVERVKRENRKVLEDIRRVVEEVKKKNRDVLKKAEDVIRKVKEDADRSRDKRMLVRLIEEVAEVLKDLLRLLKESDEEVIDALRKALERLERSSEKLAKVVRDVIREENLEEELEDTVRKLLETSKKLLDEAREVLERLHRRSEELLRRVEETLRRLEDEVRKITK

SEQ ID NO: 13631 - protein, 237 aa, Artificial Sequence; identical to SEQ ID NO: 13630
  Synthetic

SEQ ID NO: 13632 - protein, 237 aa, Artificial Sequence
  Synthetic
DKEDKLRKIKELIRKLLETIKRLVEEHDKELDETLKKLEDLVREHDRLLDETLKRLEERGLPEDVLRELKKAVEDVKRKNKRVLEEAERVIRDVKRENKEVLRTLKRVVEEVEDALDRTRDDKAVEDLIRKLIEALKEALDRLRRSDEKVVEVVRRLLKLLKDSSKDLADVLREVIRKTNEEEELERDLERLEKTSEDLLRRVKEEIDRLHERSKKLLDEARKKLEELLKTVKDIAK

SEQ ID NO: 13633 - protein, 237 aa, Artificial Sequence; identical to SEQ ID NO: 13632
  Synthetic

SEQ ID NO: 13634 - protein, 238 aa, Artificial Sequence
  Synthetic
SEREELARDLDDLRRRLREAAEELKKKHEKLRRELEELAKELRKRHEELKKELDDAARRGEPSEDLVRRIEEVIDDLHEKVRKIIEEIKRALDKLNEDVERLIREIKRVLDELLDKVRRRGLPKDVLKRLEDVLREIKEELDRVLKEHKETIKKVKDALDEILREHEEVVKKLKKELRDSKEEEVLKRILDKLMKVSEDVLRKLEDLLREVIELTKKVLDLLDELLKRVKKVLEEVMK

SEQ ID NO: 13635 - protein, 238 aa, Artificial Sequence; identical to SEQ ID NO: 13634
  Synthetic

SEQ ID NO: 13636 - protein, 240 aa, Artificial Sequence
  Synthetic
DREKKVRDIEEDLKRVLDKLRRRVETSKEELKKVLKRDKENADELEKTLRDVVRELDRKIDSEVLRAVREIVKRLVEVVRRYNELSEKIIRDLVRVNDRVLELLKRIVKRLIDVVRELEEIEDKEKALRRLEEVVKEVKRRIEELLKELEDVHRELVKILEEVNEDLKRVATEVKEIIKTIIKISEVAKELDEVIKRLLDNLKENTDRLKEVIDRNLKDLRDLAEELRRVIERLLEDARR

SEQ ID NO: 13637 - protein, 240 aa, Artificial Sequence; identical to SEQ ID NO: 13636
  Synthetic

SEQ ID NO: 13638 - protein, 238 aa, Artificial Sequence
  Synthetic
DKEEVLKDIKRKLDDHRRRTDEIVERLERLLKEHEEKTRRLLEDVRKKLEELKEIIKRKEQSEELLIKSVEELLRETKKILEDLIRHLDELVKRILDILRDLDRHLEELIRDTKRILEEGDAEERLLKKLEELLRRLLKRNKEALERLKRILEELLKRNRDALKRAEDELRKVLEDLRRRPEEEVLKRILDRIEELLRRLVKVNTDSLRELKRVVDELVKVDRESLRELERVLRELTK

SEQ ID NO: 13639 - protein, 238 aa, Artificial Sequence; identical to SEQ ID NO: 13638
  Synthetic

SEQ ID NO: 13640 - protein, 241 aa, Artificial Sequence
  Synthetic
SKEEEIVRELEKILRDHLRKVERIVEDLEKLLDDHLKKIEELAKRLEEIIREAARKLEEKGVDDKVIKKIRELLREIEEELRKVLEDVRRLHKKLREELRRVVKRIRDLHKRILDELRKDTREDAIRRVLELIKKVSREILELVKRVLEALRRISREVAKLLRRVLETIRRVLEEVVKEVEDEEVKELLKRVEKLIDDVRKKVEDLHRELEKALRDIDRKVKRLNEELERLVEEVEEKVKT

SEQ ID NO: 13641 - protein, 241 aa, Artificial Sequence; identical to SEQ ID NO: 13640
  Synthetic

SEQ ID NO: 13642 - protein, 233 aa, Artificial Sequence
  Synthetic
SESEELRRKLEELEKELRDVLTKDRKMLEDLKRRLDKLVKDSERRIRELKRRLDEKIKDEDVKRVITRLVEEIKRVNEEVKKALEDVLRELRKVSEDIARLLKRVIDDIRRVLEELDRTTDKETADRLLKRLKEIIDKVREDVKRLNDKLRELVDRVRKRVEELHTRLRELLKKLNLPREIVEELRKVIEDHERLVREILELLRKAIDDNHKLVRDLLERLKRALDETREDRR

SEQ ID NO: 13643 - protein, 233 aa, Artificial Sequence; identical to SEQ ID NO: 13642
  Synthetic

SEQ ID NO: 13644 - protein, 241 aa, Artificial Sequence
  Synthetic
RETEETLKKLEKLLRKMLEVSKRLNEEDEKLLRTKRKLIEDLLRRVEELLEETRRVVSNTTDERVLRRADEVLDEVRKIVEDVERAVEEALREVERVNEEIIRKNEELVERVKTVLERIRRIREKEKILRALKEVVEILKEALEENLKAVRKSIEIHRKVIELLVRLVERIVKILREILEEVVDDKDLVETLKRKLDKLLRDIRELAKDYKRKLDRLLEDVERLHRELKKELDELLKEVKD

SEQ ID NO: 13645 - protein, 241 aa, Artificial Sequence; identical to SEQ ID NO: 13644
  Synthetic

SEQ ID NO: 13646 - protein, 245 aa, Artificial Sequence
  Synthetic
SELEKLLTDLERVIRKVVEDLRRLLEEHKKALDEDKKRDEDSNEELADAIRKVIEKLKRTTDEEIIERALRELLKVATEVIKKNIESNRESVKVTRRVIKDIVEVVKRLIDVLRKVIKEIVRRDPRRDKAEKVRRLVEELARRLEELLREIRKLLEDSTRKVERLNEEVERLLRELAETVKELTDKRAREEDTKRLLEKIHDDHRKLVEENERLLREDHKTLEDLIRKIKKLAEEILELTARETK

SEQ ID NO: 13647 - protein, 245 aa, Artificial Sequence; identical to SEQ ID NO: 13646
  Synthetic

SEQ ID NO: 13648 - protein, 240 aa, Artificial Sequence
  Synthetic
DEREVLKEILDLVRRLLELALEILKRSLELLRRLAEEAKKVLDRSVELLRRLVREAKEAAKNPDERVKREVVEKAERVLEESKRRLTEVLERIKRVLEESKRLIKEVLDRIRDVIRRVKERRGEDKDVKKLLDLLRELLRELKELLEDHLRIIEEIIEKLKRLIDEHLEILKKILDRLRREGITDELVKEVEDRLRESEKKLERLLEDVERLLRENEERLRRLLEEVERLLRELAETLER

SEQ ID NO: 13649 - protein, 240 aa, Artificial Sequence; identical to SEQ ID NO: 13648
  Synthetic

SEQ ID NO: 13650 - protein, 241 aa, Artificial Sequence
  Synthetic
SEKEEVEKRLKKVDEDTKRAVEEVKKAIEEVLRRHEEASKRVEEAIRRVLKELEDLKEDESVLRRVLRMIEEISKEHIRVLEETLKLIEEIVKKVLDVLREDLDASREVVERVERAIKDEKTLRELREILERHERLMEEVLRRLEKLLEEARKFVERVKRENKKLLDDARDVIRRLEEARRDVDREELLERLKELIKRLLEALKRLDEEVSKLIDELLKRLEKLAKEVLDLNRELLERTRR

SEQ ID NO: 13651 - protein, 241 aa, Artificial Sequence; identical to SEQ ID NO: 13650
  Synthetic

SEQ ID NO: 13652 - protein, 244 aa, Artificial Sequence
  Synthetic
SDEERLDKVLKEAEDIIRELERLLRESLETLKRLIERLEKLLRDSLEELRRLIEDLARKRVPKEILDRLLTVHEETLRLLKEVLDKLLEVHKEILDELKKILEKLLRAVEEILRRLKKIRRERELEEVLKRLKKALEDIKRELEEVLRRDEEVNEEAKRDLDRIVERNERANREIEEELRRSNVPEDVVRMLKEVSRRDEELTRRLLRMAKKLLEDNEELSRRLVKKLDEVLKRVEEIIKRETD

SEQ ID NO: 13653 - protein, 244 aa, Artificial Sequence; identical to SEQ ID NO: 13652
  Synthetic

SEQ ID NO: 13654 - protein, 246 aa, Artificial Sequence
  Synthetic
SREERIRKLAEDLKRKIEELLRRVRKLAEEHKRLIEKILEESERLAEELKRRAEELKKRLDKEEILRVVDKLIKILKKLVDAHRRSLEKHLRVVDELIRRIEEVLKKLLEILDELIKLLENRDSKEVERVLREVLEKLERVIRELEKLLREVLKASEDISREDMKAIRDVLEDLKRVLDEIRKKGVPKEVLDELRRLLELLKKLVDRLLELNKRLNDHAKKLVEDLLRLLKKLLEEIKKLVDDARR

SEQ ID NO: 13655 - protein, 246 aa, Artificial Sequence; identical to SEQ ID NO: 13654
  Synthetic

SEQ ID NO: 13656 - protein, 236 aa, Artificial Sequence
  Synthetic
SEEERLEEEVRRELERYRRTVRRLAEEVKEELERYEREVKKEEEKLEKTLEDLERELTRDGLDRESAKETLRKLREDIRRTLKKNEDLLRKIEKRIKEVLDRNEEMLKRIKELVDRGNLDRDKLERIERLIKRLRELSKRVAEELERLIRELRKLNRRVLEELDRLLRELEDRLRKTEDKKTIAEELKRVLRELTRILRELVKLNSDVVRRLLEVLTRLAKLSEDVVREILEIERE

SEQ ID NO: 13657 - protein, 236 aa, Artificial Sequence; identical to SEQ ID NO: 13656
  Synthetic

SEQ ID NO: 13658 - protein, 245 aa, Artificial Sequence
  Synthetic
SEEEKLETVREELRRALERIEELITKNEKKIEDTLRDIRREIEENARTVKEALERIKKDGVDREDLKDIKRRYDEMLEKLKRELDEIVREIKERHERLRKELDDIVKRVEEKLRELRKKPNSEELIRELLEIVREALERIRRLLKKLLEANERLLKRIRELLDELLKANDKLVKDLEDILRKENMPKEKVDRTKEELERLKKEHRERVEETKRKLDELKKEHEREIRKTETDLRRLLKELADRAK

SEQ ID NO: 13659 - protein, 245 aa, Artificial Sequence; identical to SEQ ID NO: 13658
  Synthetic

SEQ ID NO: 13660 - protein, 247 aa, Artificial Sequence
  Synthetic
SEDEKLRKLVEEVERTLKKLIDYLRENVEDVDRILRRLKELIDRHLKKVRELIEKLLRGGIDRKELRDLKRRVEDLHRKIREELKELKKRYKELIDRIKEDAERILKEAKRKIDEIEKLDDDRKSLLKALEEIVRDLVRLIRELLRKLKEINKDLVKAIRELLEALLEIHKRIVDAIRDIVRRELREDKDTVREIEKDLEDSKRELERIKEEIEELLKRLEDKNERAIEEIEEDLKRLEERLREAAK

SEQ ID NO: 13661 - protein, 247 aa, Artificial Sequence; identical to SEQ ID NO: 13660
  Synthetic

SEQ ID NO: 13662 - protein, 248 aa, Artificial Sequence
  Synthetic
SEEEKLRKTEEDLKRTLEELKKILDDHLRIIERLLREIKRVLEENKRNARRLLEEIKRSGLDTEELKRIEEEYKRRLDEILRELRELVEEAKRLHDRIKEELDELRKRVKELLERIRRSDRDRKELLKELEDVIKEAVDAVRRLLDELRKVHKRLVDAVRRLVEKLKRINKRLVDLIREILEKMKKDLDERVLKRLEKELRDHLKRLEEIIKRLEEDLKKTLDELKRTIEDAERKLRDLERKVKEDAK

SEQ ID NO: 13663 - protein, 248 aa, Artificial Sequence; identical to SEQ ID NO: 13662
  Synthetic

SEQ ID NO: 13664 - protein, 246 aa, Artificial Sequence
  Synthetic
SILERLVRELIRLLRELLRIHKELVERVIRVLERLLEVHKKLVETIERLLDKLAELVRRGLPEKDLKTEIDRVKTELERVLRETKEEVKRLIEEIKRLEDDSRRRMKELVEEIERLIRKLEKDGTEPREKLKRAADEARRLLEELKKLHETSIDETRRILEKLKRVHEELEERTRRLDKRLEELARRGSDKREIEKVLREIKEELRRSLRELKRVLDEVKERLKESLERLRKLIEEIKERLDRIRK

SEQ ID NO: 13665 - protein, 246 aa, Artificial Sequence; identical to SEQ ID NO: 13664
  Synthetic

SEQ ID NO: 13666 - protein, 252 aa, Artificial Sequence
  Synthetic
SLEEITKRLLELVEENLRRHEEILRELLELAKRLAKEDRDILEEVLKLIEELLKLLEDNTSSEEDLKRLLKEVIEELRRVVKRVKDKWDEVVKRIEDLVKKLKELHDDTLRKLRELVRKIVTDIREKGGEAEKVKRVVEKILELVERLAKVVKESVEKLLEILRELAEVSKRVAEALLRLLEELVRVIRIKDERTLREVVRKVLEEAKRLLDELEEVHKRVKKELEDIIEENRRVVKRVRDELREIKRELDE

SEQ ID NO: 13667 - protein, 252 aa, Artificial Sequence; identical to SEQ ID NO: 13666
  Synthetic

SEQ ID NO: 13668 - protein, 247 aa, Artificial Sequence
  Synthetic
SKIEEVLERAKEVLDRLLDLHRRLVKEIEDVLDRSNELLDRLLKELEKVLDELLDIVRRRSSEEVLEELRRILETLARRLDDALRKDKELVDRLEKSLEDVLRTSERIVRKLEKELEDVVREGAVRKEVVEAIVRLLRELVEINREIVKRIVELLREHNRASRRLVEEIKRLLKEILDVARKIVERTSEEALKELKERIEEIKKTLRELLKELKKLNREIKETIKELSERLARAVEKIKRELEKLRK

SEQ ID NO: 13669 - protein, 247 aa, Artificial Sequence; identical to SEQ ID NO: 13668
  Synthetic

SEQ ID NO: 13670 - protein, 241 aa, Artificial Sequence
  Synthetic
KAEEAVEKLVRIARAIVKINEDLSREVVRILREIVRLNEETTRLLVEIAREVVKVVEDAGLSEDVVRKLRKLVKELEDLLKKSNDDIRKLVEDVRRRLKESNDEIRRLVERLEELLKRLPDDEELLRLVEELTEELLRTHEEVVKALEKLTRDLLELHRELLERVRRLTKRIEEELKRVNVSEELLRRLEELRKRLEKVLDDSRKELEKLKRELERLLEESRRKLEKLKRDLERVLEETRR

SEQ ID NO: 13671 - protein, 241 aa, Artificial Sequence; identical to SEQ ID NO: 13670
  Synthetic

SEQ ID NO: 13672 - protein, 243 aa, Artificial Sequence
  Synthetic
DDRRILKLLIDIIRKLVKLNEETADKLIRVIDELLKMAEESLKKVIDLVRTLVEIIRRERGKRDLERVLRRIKEEMERIKREHEEALKEIEERLKRIVDEHERLLEEIERELREVEREADDKPQSERVKRLRERLRRILKEILDVSRKVLKDLKDLADEILEDSEEILKELERLIREILKVTAETDDRKVVEELLRKVEKLIKDIRERYERLVKKVRDLVERWKELVRRLLKKAEDVIREIEK

SEQ ID NO: 13673 - protein, 243 aa, Artificial Sequence; identical to SEQ ID NO: 13672
  Synthetic

SEQ ID NO: 13674 - protein, 236 aa, Artificial Sequence
  Synthetic
DEEDALRTIEELVKRVNEENKKILDESEDLVRRLNEKNERINKESRDLVKKLREDAEDLDDEELVKKIIDVIRRNLELNRRSVKLVIEVLERNLELNEESIRLVLKVLEEILEILRETTRSEKLKELEKIAKRIIEEIRKALEEAKELNKRIIERLEKVLREIEKLNKELEDLVRRKGAGDERVLKLVEDAAREDERLNRELDRATREVAEEDKKLNEDIDKTLNDVIRELLEAAR

SEQ ID NO: 13675 - protein, 236 aa, Artificial Sequence; identical to SEQ ID NO: 13674
  Synthetic

SEQ ID NO: 13676 - protein, 240 aa, Artificial Sequence
  Synthetic
SSVETIKKLVEDARKKLEDSIRKIEKLVRDVEKTLRDSLKRIRDLVEKVVRTLRELLREPKTEELLRRTRKLVREVLERLKKINKEVLDILKKVLEDLERIDKEVLDLLRDIIKKLEDMNQVDEKVIRRLRRLAEEIEKRVEDINRESRKKADDIRRKVEEINERSDRAAKEVEDEARRNDSDLEELVKRITDILREHVKMHEDLIRAIAKVLRDHVEAHKRLIKRITEILEEVVKAVTD

SEQ ID NO: 13677 - protein, 240 aa, Artificial Sequence; identical to SEQ ID NO: 13676
  Synthetic

SEQ ID NO: 13678 - protein, 242 aa, Artificial Sequence
  Synthetic
DTKEEIKKLVEELLRLIEELIKRTEELNKEDNEIAERVVETHSRILRDLLRSLEEVARTRDKRVVKTLDEKAREVVKTSDKLVDEWRERSERIVEEAERLVRKLEEDVRRVIDEIRRLTQREKLKKILDELKRLLEKVIKLLEELIRKHLELAERVIRLLKEITRENLEIVKEAIDALDAGLDDDELREVLDRIRERVKRSEDKLREVLERLKRDSKRIHKDLRKALEEAKKDVDEIRKETE

SEQ ID NO: 13679 - protein, 242 aa, Artificial Sequence; identical to SEQ ID NO: 13678
  Synthetic

SEQ ID NO: 13680 - protein, 238 aa, Artificial Sequence
  Synthetic
RREEELKRIIREIERILEELRRRSREIEEKLKKVLEEHERVSRRIKERVEDLKRKVRDKEKLVRRLAELLKEASDVNHKLIRDIARLLKEASEIIKRAVKRLSDLLEEVVRVLKDGNSDERLVDTARRLVEEIVRRLEKVVEEHEEIVERVVRRLEESNRKHRRLVKEIIDRLEDLVRRNVDEKDIERIVEEALKLHEDVHDENRRILEEAIRTHREVIKRLEEIVKEAIKLIEDVTR

SEQ ID NO: 13681 - protein, 238 aa, Artificial Sequence; identical to SEQ ID NO: 13680
  Synthetic

SEQ ID NO: 13682 - protein, 238 aa, Artificial Sequence
  Synthetic
SEKELLEEIEKRAEEVLREHDKRSEEIKRELERVLKELRDLSRKIEEDLERLVREVTDLEELVRRLVEIARRASKIIEDVVRKLAKLLREASEVIKKTVDKLVRLLEEAVRLLREGNTEEERVRDLERLVEEIVRRLEEIVRKHRELVRRIVERLREIVEEHKRIVEEVVKTLERLVENRVDKKDIERIVRELIKVHRDVLRKLEKVVREALELHDRVNKELREVVERALRLLREVTR

SEQ ID NO: 13683 - protein, 238 aa, Artificial Sequence; identical to SEQ ID NO: 13682
  Synthetic

SEQ ID NO: 13684 - protein, 239 aa, Artificial Sequence
  Synthetic
SEEEILKKIEDRLRAITEKHERMLREIKKELKKVMDEHEDLLRKIEKELRDVLERLRRGVDRKEVIELLARILEKVLELNERILRKLVKILKKVIDLHREAIRELLEVLEDVLRRLRGTDDDVARELERVVRELKEELKRSVEKIERAAREIEDLLRRVLEESKRLVEELKRRLRRIKDNNLDATLLERIVERARRELTKNHDKLRKILERLERILRELNEDLRRILTTAVDILRKLRK

SEQ ID NO: 13685 - protein, 239 aa, Artificial Sequence; identical to SEQ ID NO: 13684
  Synthetic

SEQ ID NO: 13686 - protein, 237 aa, Artificial Sequence
  Synthetic
REDEVLRDIERLLREIEEKIRRILEESTRELRKVEEEVKRIIERTKRELKKIKEDVERKGIDEELRKLLDEVLDKLTKLIERNKRSLERILELIKRIIDENLEVLRDIIRLLEELLKMTKDNRVPKDEVIKLVEDVVRRIEELVTRVVRRNEKLVKDLDDLAKKNVRENEELLREIDRKLDRDLLEKIKRVIREHIKALEKLARDLKEILRRHIEALKELARDLAEVIRKLLEDVKR

SEQ ID NO: 13687 - protein, 237 aa, Artificial Sequence; identical to SEQ ID NO: 13686
  Synthetic

SEQ ID NO: 13688 - protein, 240 aa, Artificial Sequence
  Synthetic
DLERLVELLKRIDDEAVKLVRKLVEVLKRIDEELVRLVEELLRALRRINEEVVRLVKRVPDKKKLKDRSEKLIREIEKLLDELRRRSEELLEEIRRLLERLKDESRKLLKRVEKELERVTDKKALELTDRWLKLHKEVVDRLAKLLRDWLRLHRRVLRELEKLTKEHLTEHERVVKILEDGRREEELLKRLRRIVEESKRRVDELLKELRKISEDVAREVERLLRELERISREVKRRVEE

SEQ ID NO: 13689 - protein, 240 aa, Artificial Sequence; identical to SEQ ID NO: 13688
  Synthetic

SEQ ID NO: 13690 - protein, 240 aa, Artificial Sequence
  Synthetic
SDEEVARELSDIVRKLVERNKESIEDAMRIVKELVDRNKKVTEDVLRLLEKLLEDVRDTPNDEELLKRVEEIVRRIAKELDDLVKETRKIVEEVEKRLRDDVKRTEDIVRELVKRAEEVNRTEKVEEAIKKIIRLLEEHVRIIREAVERIIRVLEKHVRIIEEIVRALITLARRIVELIARNGSEEFLRRLKEEVRKIVEKVKRDLERSLKELERILEEVKRMLERSLRELERVLKEIKD

SEQ ID NO: 13691 - protein, 240 aa, Artificial Sequence; identical to SEQ ID NO: 13690
  Synthetic

SEQ ID NO: 13692 - protein, 231 aa, Artificial Sequence
  Synthetic
SKEEILRELEELSRRLVEKLKDLLRKLEKLSDEVVKELRKSLEELKDLADKMVKKLGDSEIARELLKVVEEHVKLLEEILERLKTVSKDIVRVVDRIAKKLLEVTKEIVELVKRLKTDKDALRELERKLEDVHRRIREELKRLLDRLRDLHRRLKEILEDSKRKLEELLTRANSDKRLLEEIVKLLRDVAKRNLDLLEKHRELLERALEEVKRLLDEHLKLLRDALRRLKK

SEQ ID NO: 13693 - protein, 231 aa, Artificial Sequence; identical to SEQ ID NO: 13692
  Synthetic

SEQ ID NO: 13694 - protein, 237 aa, Artificial Sequence
  Synthetic
SREDLLRKLKELIETILRKSSELLDRLLKLVREHSETSERLIRELKKILEDILKLIKGGISEDDVRRIVKEAKDELRRSVEEVKKSVDDLKEELKRSLREVRELVKRIADALEEIVRRSSSLREVIKKLLELLRRLLEVHERTIRLLAELLERHLEVHEESIRLLLRLLEELLELVERKGDEKELRRIKEAVERVLRDHKRKNDKILRDVEEVLRRHLEELRRILKDVKKVLDEARK

SEQ ID NO: 13695 - protein, 237 aa, Artificial Sequence; identical to SEQ ID NO: 13694
  Synthetic

SEQ ID NO: 13696 - protein, 237 aa, Artificial Sequence
  Synthetic
DDEELLKRLEDLDERLLRFSKENLEELRRRTRELIETSETLLERLREIIETILKVIRDGARKEEVKKLVDELERVLEESLREVKRLVDELRETLKKSLEDVRRLVREIEEVLDKIVEDSSRLKDVIDKLREILKRIADIHEESLRRLVELLEELLRAHERSLRKLTELLRRLLEAVRQGGPERFLEEIAERVERILKEHRELLKRIEDEVRRVLTEHKKKLEKLKREVERVAEETKT

SEQ ID NO: 13697 - protein, 237 aa, Artificial Sequence; identical to SEQ ID NO: 13696
  Synthetic

SEQ ID NO: 13698 - protein, 237 aa, Artificial Sequence
  Synthetic
KETDEVVKRAKELVDTLLKVIKEHVERLKRLVEELLKVIRDHVRILRELAKRLREKVVKSEIADEVEKIVRDVARENERVVERIKRLAERNARSNDEVVRRIEELVDRLAKLAKKLDKKELLDTLKRITDEAIRLVEELLEENKRSMEELIRLVEDILEKNRRVEKKIIDLVRREPTTSDVERVLEELRRRLEKSVEEVERVLKRLKEELDKSVEEVKDVLRRLLEDLKRVVEELRR

SEQ ID NO: 13699 - protein, 237 aa, Artificial Sequence; identical to SEQ ID NO: 13698
  Synthetic

SEQ ID NO: 13700 - protein, 240 aa, Artificial Sequence
  Synthetic
SEEERVLEEIKREIDRIVKRARELLEKYRELVERIKRRNEEILKKYEKLLEEIERLADAGVPKEELLKLLREISKEHLKVLKELLDLVKELSDVSLEALKELLEELTRIVKEVLKALRRADIPEVDKVIETLERLLDELREVVERIIKRDADLLRKIEKVVRDIIETDKKLLEELERLIRAGVQERDLKRALRRHAEELTRLNKELNELLKEHEDELRRLLAELDRIVRKLLRTLKELTE

SEQ ID NO: 13701 - protein, 240 aa, Artificial Sequence; identical to SEQ ID NO: 13700
  Synthetic

SEQ ID NO: 13702 - protein, 236 aa, Artificial Sequence
  Synthetic
SKEEEAKRVIDELREELRRILRENTELVKESERRITELLKENSDLVEEVRRRLEEVLEKERDEKIKRLVELVEELLKRHNDIVRRLVKLHRDLLKRHNDVVRRLIELLDDLLRKLVEAIERGEDEKRLRKLLEDARRRIEKLERESREELKEVHERLKKLADDSRRLLEDVKRKLEEEGTREDLKRLVDDVLRLAEESHRKIEELNRRTLKLMEDSHRKLKELVRKALELITELTR

SEQ ID NO: 13703 - protein, 236 aa, Artificial Sequence; identical to SEQ ID NO: 13702
  Synthetic

SEQ ID NO: 13704 - protein, 242 aa, Artificial Sequence
  Synthetic
DSIERLAEELDKIVTDVLRVNEDSVRTWTRILEEVLRLNRELARILIDIARRVLELVKRKSPEEDIKRLTEELKRVLEEYERRLDRLTEEARDALREYERRLEELKERLRRALDRARKDVDEEVEKITRETEKELERLTETHKELVKTLEELLRRIVDDTARVIKEILDLLKELLDMTRELSEKELLDEVRRLLKRVKELLKRSIDLVEKILRDVKRLLDESIELVKRVLDKIRRLLEELAR

SEQ ID NO: 13705 - protein, 242 aa, Artificial Sequence; identical to SEQ ID NO: 13704
  Synthetic

SEQ ID NO: 13706 - protein, 239 aa, Artificial Sequence
  Synthetic
SEEDEVLKTLDRKHKEAKKELDKVLRELEEEHKKVKRELDEVLKRLEDIHRRITELLRRGDIRLEDVLRMVKEANRELVEVIKRIVKTVEDLNRRAVEVVKRLAEELERLNREMVKVLRKSGREEEIEKDLRRSSKDIRRLVEEIERRLRDSLRKLRKLADDLAKKLKESLDKLEELVRRGVDEEAVERVLKENKELIEEIVRLIRKILDENIELIRRIVRLLERLLRENLRLIEEARK

SEQ ID NO: 13707 - protein, 239 aa, Artificial Sequence; identical to SEQ ID NO: 13706
  Synthetic

SEQ ID NO: 13708 - protein, 248 aa, Artificial Sequence
  Synthetic
SKEEDVRRLIEELVRELRRILEENRRMLKELVEKLEEVLRRSEEVWRRLAKELDELLKELNRDVVREAVETIRRVLEDLVELDRRVVKVIKEVLERHAKSSTELVRELEDVLRAAVEAIEKVKREEDLKRELRKLKERLKKVLKRHDDTNKELFRELEDVLRKHEEELRRLADELRRLLEDLKRKGDIPEEVIKKIEDLVRKTERELREVHKELRRLVEEAKEVVDRSVEILRDLVRKIVRILEESAR

SEQ ID NO: 13709 - protein, 248 aa, Artificial Sequence; identical to SEQ ID NO: 13708
  Synthetic

SEQ ID NO: 13710 - protein, 249 aa, Artificial Sequence
  Synthetic
STEDELRKIKEELEDIRRRIEELDKKDNEDLDRIDEEIKRRLDKNIRDLDEIAKEVRKRRQDKDLLKEIVERLAEVLRHHVRVTADVVRLLAEVLKHNNELLKEAVRLLTELLRKILKVLKDAGKPEDEVRKLKEELEEIERRLRELVERNRRLSEELIRRAEKNVEDVRKKVEDLIREAEEVVKANLPKEELAEITERLLKKYREVAEENMRSLKELLREYREVNTRTHKALERIIDRIREILEKVRK

SEQ ID NO: 13711 - protein, 249 aa, Artificial Sequence; identical to SEQ ID NO: 13710
  Synthetic

SEQ ID NO: 13712 - protein, 233 aa, Artificial Sequence
  Synthetic
KEKEAIKEVAELLKRLIDDLLRLLKEDVDTARRVLDEIKKLLEENERIAREVLRRLREDKGKERAEELVREWIERTREILKRIEELLRRWTRKTREILKRIEELVRRVIEVVRRLDVPKELVDKLEEVLRKLLKLVEDHVRKVEKIIRELLKLIKEHVEKVERIARKLLELLRRNRDETDLDRIVKEMEKVLEDSIRELEKLVKRLEDILRESEKALRDLLRELRKVLEEVRT

SEQ ID NO: 13713 - protein, 233 aa, Artificial Sequence; identical to SEQ ID NO: 13712
  Synthetic

SEQ ID NO: 13714 - protein, 230 aa, Artificial Sequence
  Synthetic
SSMETAVKLVKDLLREDIRSNEEHVRLAKKLLEEDIESNERLLRILKKLLDLVEKTEDDEKLRKDLREVLEELRELVDRNKKRLEDVLRESERLATENKKRLERVLRELERTGLEERVLREVRKLLEELKELNDRTLEETRRLLDRLKKLNEEILELLERLLRRLEKLRKDKSDREELRRVAEEIKRRAEELLRRTEELVRDILRRHEDALRRTEELVRRIEKRLRDATR

SEQ ID NO: 13715 - protein, 230 aa, Artificial Sequence; identical to SEQ ID NO: 13714
  Synthetic

SEQ ID NO: 13716 - protein, 247 aa, Artificial Sequence
  Synthetic
RELEDVLRMIEELARRLVEILERHNKLSKRVIELLVRILEEHLKLVAELIKKAVEILRRILREDGKLAEEVIKRLEDAVEESKRNVDETKRKLKEAVRKDNELVKTVKEILKRVVDTVRELVKNNGDKEEIIRLIREMLKKLEEILRESEKLLRDLLEEAERSLEENIERLERLLEDLKRIIENANVRDDIRKLLKELLDDVKKIIDDSRRLLDELRKELEKILKESEKLVDELREAVDRLIRKVRE

SEQ ID NO: 13717 - protein, 247 aa, Artificial Sequence; identical to SEQ ID NO: 13716
  Synthetic

SEQ ID NO: 13718 - protein, 237 aa, Artificial Sequence
  Synthetic
SREELLKELRKLVEEIKRRSEELLRRLEKLLEDNERRTRELLERLKELLREIEERIRGGRPSEEVIRLLEELVRAIERVLEEHLESNRRLVEAAERVLREHVELVKRLVRAIEDVVEKELEEDKIRTIKKLLDEWRRRLEKLVRDVRRKLEEWIKRTEEMIDEVRRLLEELKETIRRKGNDRDIVRELTELVRRLLKRVEELLKRSLEILRELIKAIADAIKESLDILDRLLREVAR

SEQ ID NO: 13719 - protein, 237 aa, Artificial Sequence; identical to SEQ ID NO: 13718
  Synthetic

SEQ ID NO: 13720 - protein, 242 aa, Artificial Sequence
  Synthetic
EEEEVLRRLRELIERLVRETEEKLKEIERRIEEVLERHRRALEELKKEIDEILEEAERRKEKVEDVVRELRRIAERLLEINERSLELLRRILKALEEIVTRHLDTLRKIAEEIIRAMRDSEKAKKLLEDLRRLVEENKRRVDELVKKVERVVEEIEELSRRLLEKLERVLKEIEDVAREGTSEEALRRLVEKVKRVLEEILKVSEEVLEKVKKVLTDILKRLKELVERNVRLLERILDEARR

SEQ ID NO: 13721 - protein, 242 aa, Artificial Sequence; identical to SEQ ID NO: 13720
  Synthetic

SEQ ID NO: 13722 - protein, 241 aa, Artificial Sequence
  Synthetic
SKIEKLLRVIKKIIDKLEELLKRLLEVVRESIELLKRILDELLKVVERTADELRRIVNDKRLLEIIEDLVRRVLELHERTIDDVRRLVKEVEEEWKRVIDELRKLVKKLEDIVEEARKSEDLETVLRLVEELTRRIEKTTEDLERRHEKILKEIIDLIRENLKRHEDITREIIKAIEKLPTTKDLERLLRKVKEDNDRVKKEVERLLKEIEDRNRKVVEEIKRRLEEIKRELDKVVEEIRR

SEQ ID NO: 13723 - protein, 241 aa, Artificial Sequence; identical to SEQ ID NO: 13722
  Synthetic

SEQ ID NO: 13724 - protein, 241 aa, Artificial Sequence; identical to SEQ ID NO: 13722
  Synthetic

SEQ ID NO: 13725 - protein, 241 aa, Artificial Sequence; identical to SEQ ID NO: 13722
  Synthetic

SEQ ID NO: 13726 - protein, 238 aa, Artificial Sequence
  Synthetic
KDEDKLRRIVAVLEDLIRLTEELAKILKRVTERLKELTEELKRRNEKVVEEILKLLRDSGLQTEDVTRKLKKIRDDYKRITDKLREDHERIREELEKILERLKREHERIIRTLEEISRKLRGEELVDTLLRLVEEVARINVEVLERLIEIVERLVEINRRVLEEILRLSAKLAEDLDRSIGDEEVVRRIRELATKNLDDNRKALEESRRIIEEIVKRIKDVIRTSREIIKELRKEIRT

SEQ ID NO: 13727 - protein, 238 aa, Artificial Sequence; identical to SEQ ID NO: 13726
  Synthetic

SEQ ID NO: 13728 - protein, 231 aa, Artificial Sequence
  Synthetic
KEAEELVEVVRKHIKTLAEIWKKLVDALRKHVEILRRLLKELVEVIRRAIERVRRDGIPEEVIRDAERVLRRIEELIERLLRENERVIREVEELIKRNLDENRKVVEDLKEVVDRNGDKRELTEIVRRLLKSNKRVAEEVVRLTERLLRENKKITDELVKIVEDLLRRITKTRGRTERLDTVLEELRRVLKELERKLRESIKELRDVLREVEERLKESIEELERVLDRLRR

SEQ ID NO: 13729 - protein, 231 aa, Artificial Sequence; identical to SEQ ID NO: 13728
  Synthetic

SEQ ID NO: 13730 - protein, 239 aa, Artificial Sequence
  Synthetic
SEEEIAERVKDLIRRVLEEHERSVKKVEDLIERVLREHRRVLEEVRRLAEELERRLGDEKLVRAVRKIAEDVVDIIRKILEIVRRTVELMKRIHKKVLDIVRKLVEDVLDILKRREREESVEEVKRRVERENEKLKREVEKVKKEHRDALERLAKEVDDVLRDAKRFLEELEKDVSNIEDDRRKDDLRRVLEELLKRLKELLEELKRINEELLKTLEKLARDNLEINKELIKRLDEETR

SEQ ID NO: 13731 - protein, 239 aa, Artificial Sequence; identical to SEQ ID NO: 13730
  Synthetic

SEQ ID NO: 13732 - protein, 246 aa, Artificial Sequence
  Synthetic
SEEDVLRKLEEIVEELERSNRDAVRRLEEVVKRVEDLWEEVVRRLRELVREVEERLRDVEAKEVVEELVKVLEEAVRIVEKALRDHVEVLRRVVEKIADLLRRNVDVLRRVVEKLKRILEARRRVDEKEVRKRLDDIRKELEDVLRETRKTVKKIEDDLRRVHKRLDEIIEDLKRRLKEVLKRVEEKGVKKKEIEEIIERVLRLLAELLKRVKRISEDLKRLLDELIEENADILRKLDELVTRDET

SEQ ID NO: 13733 - protein, 246 aa, Artificial Sequence; identical to SEQ ID NO: 13732
  Synthetic

SEQ ID NO: 13734 - protein, 251 aa, Artificial Sequence
  Synthetic
DKERIIKRVLDELKEALKKAEKLHEDVLRELRRLLDEALKLHEDVLRELEELLRKIESTLEDEKLKKKLRDVKRDIDRLVERNRRLLEELRKRLEDLVRRNRELLERLKRKLEELDRRIKELEERGTPREELLERVAEIIREILEDIRRVVTHLRKSIRDILKEIREVVKHLVEVIRDIARRITELLAEDRNREKVEELADEIRRVVKRIEERHDKLRKDIERLVRRIEELHKRLLEELEELVKRITEELK

SEQ ID NO: 13735 - protein, 251 aa, Artificial Sequence; identical to SEQ ID NO: 13734
  Synthetic

SEQ ID NO: 13736 - protein, 231 aa, Artificial Sequence
  Synthetic
SVLETIVDIVRKLIELIEKLLRDLLELDKRNVDAVARNADKILKIAEDIVRTIASKGVPEEVKRRLEEILERIARLVRESKERLKRNNEELEKLVRKLEKELKEVLDDVKRVVDAGEDKDDALRRILELLDRLLESIKRVLKEITDSNKRLLDEHERVSKELIELLREMAERVNLDEDLKRELDRLIKEIEESNRRLKKTTKDLVDEVERILRKIKDDIEDVKRKIEEDKR

SEQ ID NO: 13737 - protein, 231 aa, Artificial Sequence; identical to SEQ ID NO: 13736
  Synthetic

SEQ ID NO: 13738 - protein, 245 aa, Artificial Sequence
  Synthetic
SEDELLDRLDESVKEVLDRHRKLLEDLADTIRRVIKKVKDLLDEHKKTLEDVIEKVLRRGIDVEELEKVKDELEKAHKKLEDDLRRILEEVKRLVEELEKHLKRIEDEAKKAIEELRRREPDKELLDRALEAIDRLLKLLTENIKRIEEIVKELLDRLKRIVDELLKVSERVVDLLRKIVDKLDTDETVVRDLRRLLEELRRISEEIVRDLRRLLEELKKIVEDVVRESKKLLDDLRRIIDETVR

SEQ ID NO: 13739 - protein, 245 aa, Artificial Sequence; identical to SEQ ID NO: 13738
  Synthetic

SEQ ID NO: 13740 - protein, 243 aa, Artificial Sequence
  Synthetic
SRAERLADEVRKAVKKSEEDNETLVREVEKAVRELKKNNKTWVDEVRKLMKRLVDLLRDNQVRDRDLLKELEEVLRRVLEALAENHERTEEILKRWLDRYREDIERLRKVLKEVIEALKREGRDDKRIVDELEEILRRNEDVLDKIKKRLRRLLEEDRRLLERIVRELKRLLDDLDRITKELKSEELVRIAIEVLKRLLEIIEELVRLNNEILERLLKIVRELHKDNIKILEDLLRIIEEVLR

SEQ ID NO: 13741 - protein, 243 aa, Artificial Sequence; identical to SEQ ID NO: 13740
  Synthetic

SEQ ID NO: 13742 - protein, 236 aa, Artificial Sequence
  Synthetic
SEVETLIRLIEENLRLLKEVADLSLEVIERLLRILKEIVKRSLDVIRRLLKLIEEVLKDRRLVERAKKEIDRLLEENDKLLKEVEKVIKELLEENRRLVTRVRRMNEELLRLIKENRKRKDDLLRELKDLNRKVLKALKESHDKLKRALEEVLRVLTESHKRLEEVLKEILDELRRRGVEDERAKKRLEDLLREHREILKEVVKRLKELLDRHRKLLDEARRESKRVLDEIDEKTK

SEQ ID NO: 13743 - protein, 236 aa, Artificial Sequence; identical to SEQ ID NO: 13742
  Synthetic

SEQ ID NO: 13744 - protein, 236 aa, Artificial Sequence
  Synthetic
SRVETLIRVVEKNLELLREIVERSLRVIKKNLRLLEEVARLSLKVIKELLEEIKRRVRTEDLLRDVERKIRDLLRKNEDLARRVREINETLLEENRELLRRAEKVNKRILDLIRNNEKPSEVLARELEKVNREVLKALEESHRKLRKVNKEVLEVLKRSHDETEKVLREILTELRRSGNEDRRVKEELKRLLEKHRELLKEAVKRSEDVLKEHKEVLDDVRRESEKVLEELRRAET

SEQ ID NO: 13745 - protein, 236 aa, Artificial Sequence; identical to SEQ ID NO: 13744
  Synthetic

SEQ ID NO: 13746 - protein, 245 aa, Artificial Sequence
  Synthetic
SEKDEVTRRIRELLKEAEETNREAIERIKRLLDRVREKVEEVAKRSEELLRRLKKVLDRDLQDDEALLKLLIDALREHNRLSTELIKILIDVLRTILKIIKDVLATNIEIARRILDLVRRLAERAGLDDRLVKEVEKLVRTAERLHRDALRKVKRLVEELEKRLRELVKTDHDLVRRLETLLRRKERRKEDLLREIARILRESLRLIRELLKEIEKIVKEIIELLERLNDELRKIIEKILETTKK

SEQ ID NO: 13747 - protein, 245 aa, Artificial Sequence; identical to SEQ ID NO: 13746
  Synthetic

SEQ ID NO: 13748 - protein, 231 aa, Artificial Sequence
  Synthetic
SRKELLKKLREVLETNLKLIEDLVRDIERALEEDRKLIEDLLRRIEEVARRILELRERGGSREEDVIREAEKIAERLKELVEKLADDSRRIVEELKKRIKELLRRSEKLVEELKKDLREDEKLLKLIEDLLRVSRRVIEALLEIVERLLEVSERVMRAIKKLIDDLMKVLRAGVEDKRLREVIKRLIEELRRLLKEYEDVLRKVREDLKKLLEEYKRVLERVDEELRKRDK

SEQ ID NO: 13749 - protein, 231 aa, Artificial Sequence; identical to SEQ ID NO: 13748
  Synthetic

SEQ ID NO: 13750 - protein, 243 aa, Artificial Sequence
  Synthetic
DEEKRVEDVLRRVEDLLRKLEEEHRRIVKRIRDELRESERKIEELVDRLRKEIDRIRKTRDDRSSVVTELIKILEEVVRAIERIVERNIEILDRIVKLHRELVKRTIEILREAVKLVAELADSEDAKRILKKLKDIVRALEEKLRRLNKEVEDVVKKLEDDHRRLVERVRRVVDELRELLERNTVRKEDLLRRTEKVEREIRKTLDDLHERTRRVVEETLRKNEELLKEIKRVVETILDEIRK

SEQ ID NO: 13751 - protein, 243 aa, Artificial Sequence; identical to SEQ ID NO: 13750
  Synthetic

SEQ ID NO: 13752 - protein, 234 aa, Artificial Sequence
  Synthetic
SKKETLVKLAEEIIADIHRVNRESLELIKRLIERVEKLTKESLDSIRKLIERILRDIDDEEVVERIERLLKKLLDENEKIIREIRELLDRLKKANEKVNEEIKKLLDDLKKELRDATDEETAIRLLVDVLRKILELLKRLSEINVRVLEEIVRLIRELSERNKRVLEDALRLVKERVDSDEVREIKEKVRELIDKDRRLVKEIEDLAREILDTDRKLVKRLEEVVRELIERARR

SEQ ID NO: 13753 - protein, 234 aa, Artificial Sequence; identical to SEQ ID NO: 13752
  Synthetic

SEQ ID NO: 13754 - protein, 236 aa, Artificial Sequence
  Synthetic
DEERVLTEIEKLVKRLKDRNDEIRRELEKTSKRLEEELERIERELDRLVEELKKELERTKDKDTIVRLIIDVVRKLLKLLEEILRLILRVIERHIELLRRLMKENIDVIKRILEELAKAADSKILEEIRRLLTEWIRKSKEIADEVDRLLKEWLDEVREIAEEIRRLAEELIKRIKDRRSDKDLEDLIRRVLTRVKELARRLDRKNKELLKEIERLIREDKETADRVKTEIKKKTD

SEQ ID NO: 13755 - protein, 236 aa, Artificial Sequence; identical to SEQ ID NO: 13754
  Synthetic

SEQ ID NO: 13756 - protein, 248 aa, Artificial Sequence
  Synthetic
DEEELVRRVEKLARDIEETLERLVKELERLYREIEKELKRLVKELEDANRRIVKRLKDLFDKKAPLERLVREVLELVKEHLKLVEDLIREVDKLNERLAEANEKLIREVLKLLKELLDIIAESVDSRKLEELERLVREVIREVAELLKRLKELHDKVSKDIRELLKELRRLHEEVIKTIKKLLDERMPDEEVLRRIEKLNKELEDVLREVEERIRKLLRELEEVSRRVTERIKRLEDELRKAFEEVTR

SEQ ID NO: 13757 - protein, 248 aa, Artificial Sequence; identical to SEQ ID NO: 13756
  Synthetic

SEQ ID NO: 13758 - protein, 236 aa, Artificial Sequence
  Synthetic
SKKEDAIRKARKLLERIRRLADKAIKRSRRLLERVRELVKESLDILRKLLERLRDLVRKIKKDGKREVLKELIRLLEELLKINKRVLDSVIELVERVIRSNEDVLRKVIRLVEELIRLVEETTDAKKLRDELRRLKEELKDIARRNRERLKRLEETLRRILKKSRDDLKRLLDEAEKKDITDELRRLTEEILKLHEESVKKLEDLTKEALEASEDVHRKLEKLTEEILRRTEEAEK

SEQ ID NO: 13759 - protein, 236 aa, Artificial Sequence; identical to SEQ ID NO: 13758
  Synthetic

SEQ ID NO: 13760 - protein, 238 aa, Artificial Sequence
  Synthetic
KEKEEADRELRELKREMEDILREVEKELRELLKKSEELLEEIERLSKELTDEAREVERNNLPEDELATELLKVIKKILDVNRDVVRKHEEILEDLERVLREVVRKLLELIRKLLDVIRRRVDSEDLKRVEELIREIEETIKKLLRELEKLIRKVKKRTRELLKESEDLIREVLDVIEKNKDLRELARKLLKRLKELNDRILETLRRLNEETARLVKEVLDTARRLLEELIRVLDETRT

SEQ ID NO: 13761 - protein, 238 aa, Artificial Sequence; identical to SEQ ID NO: 13760
  Synthetic

SEQ ID NO: 13762 - protein, 247 aa, Artificial Sequence
  Synthetic
SKEDRLREILTELKEVIDTILRKLEEDARRLKKAHEESNEKLKRIVEDLERVLRELLRKLKERVDERLEEEAKRILTEVRKELKKIEEEARRINKEYEDDVRDIERKVERIKEKLERLVERIERSDRDEKELIEEVIKVIEDVLRLIEELIKEWIRVNEKALELDRRLVEEVKRVIERLLRAIERLISKGNKELLDKAKEIVDRVTEEVERILEENERLWRESIKDVKRILDEAREIVRRLLEEVRK

SEQ ID NO: 13763 - protein, 247 aa, Artificial Sequence; identical to SEQ ID NO: 13762
  Synthetic

SEQ ID NO: 13764 - protein, 233 aa, Artificial Sequence
  Synthetic
DESEKVKEILERIERSLREVKRRVDEVLKRIKELLEELKRRHDESVKELKRILEEIRNSDKEAVKRVEKREREIIKRDIEVNERVLRELKKLLEELKKVLEENLKRLKELLEELDTTDDIRREVERLIKENRELIKRVEEEMRKLEETLRRMAKEYKREVDELEERARKSNLDGEELAKTLEKLAKELLDANRRLVDTSVKLVKRLLEIVAELVERHKESNRRLLKLIEDRDR

SEQ ID NO: 13765 - protein, 233 aa, Artificial Sequence; identical to SEQ ID NO: 13764
  Synthetic

SEQ ID NO: 13766 - protein, 236 aa, Artificial Sequence
  Synthetic
SEEDILRRVVEELERLIKEAKEIIEEIRRLHEELDRKSEELLDRLLELLRDLLRRLNVDDERLRRALERVEREIKRLKDEYKENNKRLEEEVERLKKELDDALERLKRELDKLKRDKDALAKLVKELLDVVREVVEALKRLSTHNVEVNEKLDRDLVRLWEEAVEVIKRVLRERLSDKDKVRRLDELVKELLERLRRLHEENTEEVERVLRESARLLDDLLRKVEEVVEKIKEELR

SEQ ID NO: 13767 - protein, 236 aa, Artificial Sequence; identical to SEQ ID NO: 13766
  Synthetic

SEQ ID NO: 13768 - protein, 237 aa, Artificial Sequence
  Synthetic
SREELVKDILRLLTESNDEHKKLSDKLVDLVRKLIELAEKLTEEVVDLVRRLLEELNLDEEVLRRLKEILEKLRKDNRDVLEELKKVLEELKEANAEVHRRSERLLRELKKRLDKVKGEEAVKLIEDVLREHSRLLEESVRRNERVAERLVELLEDLVDKNRRVLEELVELIARALDSEDAKELLKKVKEIVDELVRRHKKLVDEVREVVERVVREHRELVKKDRRLVDEVLKRLRT

SEQ ID NO: 13769 - protein, 237 aa, Artificial Sequence; identical to SEQ ID NO: 13768
  Synthetic

SEQ ID NO: 13770 - protein, 237 aa, Artificial Sequence
  Synthetic
SREDLTRETERLLRESNEKHKELTKEIIRLVDRLIKLLEELTERLKELVKELLKRLRLDKEVLDRLREILKELDEANRTVVDTLRKVLKRLKEELDRVHRESEELLRTLRDLAERVRGEELVERITRALETHSELLERSVELLKRVLEELVKLARELVKRNEDVLRRLVELVERALDSEDAKKLVKEVRDVVERVRREHDKLVKEIEKIVRDIEKKLRDLVREDRELVKKIEKKLRD

SEQ ID NO: 13771 - protein, 237 aa, Artificial Sequence; identical to SEQ ID NO: 13770
  Synthetic

SEQ ID NO: 13772 - protein, 239 aa, Artificial Sequence
  Synthetic
SAEDLVRRVKDLVDKLEDKLRKVVRTNERLWEEIRKRLEELVRRNKELWDRLVEKLKAGDKDKDELIEEAKRLEDESNKLVEKLVRDIERVLRESNKLLDTLAKEIEEVLEEIVELVEREGLADKKAREKLEDIKRRLKEVLKKLREESKRIIDELRRLLEEYKRLVKEIRDRIEEVRKRNSEIRVLVELVRRHNKVLKELVEELEKLVRDHNRVVEEVVRELVELLRRAVEVIKEVVK

SEQ ID NO: 13773 - protein, 239 aa, Artificial Sequence; identical to SEQ ID NO: 13772
  Synthetic

SEQ ID NO: 13774 - protein, 253 aa, Artificial Sequence
  Synthetic
REKEVIDDVRRMLEDLLRTIRRVIEENKRIVKESSDHIREVLKRVLEVLRRLLEEVKRLTERPVDEEDVKRTAEELLRILEEVVKEVEDAVERNRRLIEESIKELKRIADELVRRAEAVIEKVETELGRESEKVERIVRIIEEVIEAIKRIVKSLVEINEEYVRLVEELVKDIVDIIRRVAKLLKELADSRRDRKDVERELEKIIREVEERLRRVKEKLDDIDRRAKELHEEVMKRLEELVERIRRLLEDVER

SEQ ID NO: 13775 - protein, 253 aa, Artificial Sequence; identical to SEQ ID NO: 13774
  Synthetic

SEQ ID NO: 13776 - protein, 254 aa, Artificial Sequence
  Synthetic
SDEEILREILKTLEDVVRRLEELLKENEKLIRESTKLIKDVLDELLEIIKRVAKLIRDLKRNKVDEKTVEDIVRKIEEDLKRVVDKLRKLVKESEKKLTDSVKALRDVVRDIERLLRELVDKARKNVRTDELREVVERLEKLLRDALRVIKRIVDELERLNREYLTDVKEIVKRLAELLDDILRVVREIARDEDEETVERKLKKLLDKARTELEKIKRRLDKLNEDYERKLRELEKRLRDLLERLRKTLEDIRK

SEQ ID NO: 13777 - protein, 254 aa, Artificial Sequence; identical to SEQ ID NO: 13776
  Synthetic

SEQ ID NO: 13778 - protein, 242 aa, Artificial Sequence
  Synthetic
SEIEKILEELKRLVERVLKLNEDIARRIAELVKKDLKLIEDLLRELEDLVRKILDALRKKKDSKELVEEIKKRLDELLKRVREESDRVLKELKELLDEVRKVHEEIKEALERLLDKARKTIKDERILRLIEEIVKRLIELVEDNLRKWEELVKRHIELNEELLKRLEKVVEDIKRIIELVARGEEDKDKVVEEIRRLLKRLKEEAEKVARESEELLRRIREASKELAERAKDLLRKLDEAVR

SEQ ID NO: 13779 - protein, 242 aa, Artificial Sequence; identical to SEQ ID NO: 13778
  Synthetic

SEQ ID NO: 13780 - protein, 251 aa, Artificial Sequence
  Synthetic
SDEERILDTLRRIIEDLLRLLREALRRHEELLRRNIELIRRVLETIKEVLRRLLKLLLEVAKEEIKELKDALRKLLEELDKALKEYKKRIKDSLDELRKVIKRLEEELRRLLRELEEVRKKIEDRKTLIDTLKRVIDDIVKLLEDALRDLERVLDENMELSRRVVEILERVIEDVLRLLEEVVRRLKERRDREELDRLLEDVRRVIEELKKLVREVLERSERMVKEVRDLWRDLKRRIEEAAERIKDELRR

SEQ ID NO: 13781 - protein, 251 aa, Artificial Sequence; identical to SEQ ID NO: 13780
  Synthetic

SEQ ID NO: 13782 - protein, 239 aa, Artificial Sequence
  Synthetic
SERELLEKVRKVAEENIRILEEVLRKIAEVVKEDLKLLKELLEATERVVEELLKRIVEKKKREPEEAIRRLRKLLKELREEMERVKKESKRLLEELERILRRAKEKTEELLKRLRELLEAGLPRKDLAETLLRVVEAHAKLLRDVARVLLKLLEDHIRLSRELARRTEEVLKRIAKILREESEDETLERLLEELERLVKEVVERSERLLKKLLEDVRRVAEELVKSVEDLLKDIEREVT

SEQ ID NO: 13783 - protein, 239 aa, Artificial Sequence; identical to SEQ ID NO: 13782
  Synthetic

SEQ ID NO: 13784 - protein, 232 aa, Artificial Sequence
  Synthetic
REKELVDDIRRILEEILRLLRRLLEEVIRLLEENEKLVRRHLKTVIDILRRVAKLLDENGIRTDEADRVLERLEKAHRELLEDYKRALEKIKETLERVLREAEEVVKKIDDALRKLGGSKEVLKRLLEELLRLVEKIAEEIKRLLKELVRVTEELVRTNKELLEEAVRVIRKEVEDDSLVREVEELIKRLEKHIDDLLKTSRDLVKRVLDLVDEVVKRVEDLVERVKEKIDT

SEQ ID NO: 13785 - protein, 232 aa, Artificial Sequence; identical to SEQ ID NO: 13784
  Synthetic

SEQ ID NO: 13786 - protein, 247 aa, Artificial Sequence
  Synthetic
DEERLAEELERVLDRNRKLLEEALRELRRVIEENRKSVKRLLDELKRVLDELLKVLRELSRDDKDEKLRKVIEDLIRKLTKVLDKVRRLVEENIERLRRVLEKLERLARENLEDLKKVLDDVDKKLKDRRLVERLAELVRELIEVNKEILEMLKEIVRELLEINRTLLERLKDLVRTALEIIKLLARGDITEEDVERAVKEIRDRLRKLLEDYERAVRRLEDKLRRVRERYEKVLKRIKDKLEETKR

SEQ ID NO: 13787 - protein, 247 aa, Artificial Sequence; identical to SEQ ID NO: 13786
  Synthetic

SEQ ID NO: 13788 - protein, 247 aa, Artificial Sequence
  Synthetic
SREEVLRELEEVIEDNRRLLEELIEKSKKVLDESLKLIDELLRRLEEVLERVLRLLEELSKLDDEETLRRIVTKIRKELEDVLDEVRRIVKEILDRDRRVAEDLKRVVDENLEKLKKVLDELDKKLKDRRLVEILRDIVRLLIEINERALRELLKLHEEHTRIVAELLRELERVVEELRRLVELIARGEIREDDLKRVVDEVEKKLRELKRRYKEALERIKEKIKELKDRYERAVREVVAELRKTTK

SEQ ID NO: 13789 - protein, 247 aa, Artificial Sequence; identical to SEQ ID NO: 13788
  Synthetic

SEQ ID NO: 13790 - protein, 230 aa, Artificial Sequence
  Synthetic
KKDEEIREKLDRLLEENRRALEEITTRLDDLLRRNKDALRKVMEKLKRLLDDLRRADIREELLKRIADVIRDIMRLLKELHDHTAEVIKTIKKLLKELHDINKEIIERLKRLKDNNVPKEELLKRVEELVRTSLRLTTEVLKTVEKLIRDDKRLSEEILKRVKELIEELKRRVDIERVKEILERILRVVEEAVRLNEESLRRILDVVRKAVKLDRESLKKILDVVEEAVR

SEQ ID NO: 13791 - protein, 230 aa, Artificial Sequence; identical to SEQ ID NO: 13790
  Synthetic

SEQ ID NO: 13792 - protein, 243 aa, Artificial Sequence
  Synthetic
SRVEELKKLIEDILRISREVVERIKRVAEDIHRINRRVLDDLRKLIEDILRTVEEILARKVKDTEMAERLRDTIRRVVDEIRKLLEEHEKRSRELLEEIRKLLEDILRRSERAVEEIRELLKKNVRTKDVLRIIEEILREHLELLERVVRRIEEILRELLKTIEEIVKRIKEILEELKEVLKRGRVKDDEVEREIRRVKEDLDRILEEYRRLLEEIKRKLEEILRRVEELHRRLRRKLEEIDR

SEQ ID NO: 13793 - protein, 243 aa, Artificial Sequence; identical to SEQ ID NO: 13792
  Synthetic

SEQ ID NO: 13794 - protein, 244 aa, Artificial Sequence
  Synthetic
SRVEKVLELLKRIIEILRELVKVHLDVLRHNDELLKRIVEDLKRLVKKLVDILKEIVEKRKGEELDEIVRRLAKKLDEIIKTLKRLVDELARRNKESIDTLRRLVERLEERLREIVKLLKKLEEEGVDEETLKRLIETILRDIERVVRELKEIMDRINDENRRVVETLVKIVDDLLKDVEDVVRRANVDEEALERLKRLLEEIRERLEELKKRLEESLKRHEEEVRKLLDKLRRLLRRAEEEAR

SEQ ID NO: 13795 - protein, 244 aa, Artificial Sequence; identical to SEQ ID NO: 13794
  Synthetic

SEQ ID NO: 13796 - protein, 232 aa, Artificial Sequence
  Synthetic
SKEDELRKVLETLERLARELEELNKKILDDLKKLIEELRRHTEEVMRRLKELADELRKKPTSEDLERILRRLEELLEEHKDDLEKITETLERLVKKHNDLNKEVLDKLRRLLEKAKKDRTGREVLKELDEIIKEWRRLLEESIRELREIIKEIKKRLDDSIRKFEKMVEDVERSGAGEEVVRVLEELLRLVRDNVRRLDEILKELLRLVEESVRTAEEILKELLRLIKELAR

SEQ ID NO: 13797 - protein, 232 aa, Artificial Sequence; identical to SEQ ID NO: 13796
  Synthetic

SEQ ID NO: 13798 - protein, 237 aa, Artificial Sequence
  Synthetic
SIEELVDELLKVLKEVVEETAKLLEENNRRLKKITDDVRRLNEDTIRRLREVVKELETKRDERDVVRRIIEKLKKVVDDYRRVIEELIKRNEEVAEESRKVSEKLLKELEDLLRDIEKKVKSREKVRMLKRLIEELIRLNKELADIDVEINKKVSEVLRRNLEKVVEIAKRVLDVIRRDTDDDKARKALEDLERELRDVDRRSDEEATRLHEEHKKALDRYVKELKRVLDKMKEDTR

SEQ ID NO: 13799 - protein, 237 aa, Artificial Sequence; identical to SEQ ID NO: 13798
  Synthetic

SEQ ID NO: 13800 - protein, 237 aa, Artificial Sequence
  Synthetic
SEKELVDKLIKLLEDVVKKLEDIARDNNRILKEIADRVKELNERTVEEIKRVIEELRRKKDDREVVKKILEDIERVLREYEREIEKLIKRNDDVARKSEEDVRRLLEEVKKVLDEISKDLKDERLVKALADVIRKAIELLKRLLDKDVKINEEVSRILKENLDEVRKIVEELLKLIERDTDEEKLTRAAEDLLRKLRRVDEESDKKLREVHRKHKEALEEVKRRLKEITEEADRATR

SEQ ID NO: 13801 - protein, 237 aa, Artificial Sequence; identical to SEQ ID NO: 13800
  Synthetic

SEQ ID NO: 13802 - protein, 240 aa, Artificial Sequence
  Synthetic
SESELIRELEKLVKEIVDELERLLRNNIRLLEEVAKTLIRLLENNIELLDEILRELERLSKENRPDDEVRRTVEELLRRSREHSREVKETVEELLRRLERHSEEVRKTVEKLLTDLRRVVERNNQEDLRKLVDDIERVLRELLEVNRRANKKAKEVLEELLEVNDRANRKVERLLEVLLRGEVSEEEVRRTIERLKEEHEDALRRLKEILEELKDEHRRVLKRVKDKLRELKRRLEEREK

SEQ ID NO: 13803 - protein, 240 aa, Artificial Sequence; identical to SEQ ID NO: 13802
  Synthetic

SEQ ID NO: 13804 - protein, 228 aa, Artificial Sequence
  Synthetic
SEREELERLLKELEDVTREVVERLKKLLRDNEKLTDEVRKRLRDLLRRLEEMVRRRGLSDEVLKDLKRLIEELLKTVEELLREHIRSVEELLKAIRKLLEDHIRLIKELVRRADQRDETLERVDRKLEEDHRRILRRLEKVVEELKKEHERILRELEKVVDKVKKDLERVRREEEIEEIVKRLVEVLEKVLRELERASRKLVKVVEEVLRALEEISKELVDVVREVLR

SEQ ID NO: 13805 - protein, 228 aa, Artificial Sequence; identical to SEQ ID NO: 13804
  Synthetic

SEQ ID NO: 13806 - protein, 244 aa, Artificial Sequence
  Synthetic
DEDRRLEDAVRKLRKEHKDIMKKLDDIMRELDEDHRRIKERLDRILEELKKLLTRVLRETREDELLRKVLELLTRLLKLLADVLEENKRLLEDILRLLKELIETNLRLLEEILRLLRKVRREPVSEEEAKRLVEEITRLLERSTEEARKLVETIKRLLEESLDKLRRLVEEIERRLRTVLEEIRRRGAPEEIERIIRRVIEVIREILDLVRKVNKKALRVIEEILEDLARVNKKAVDAIDELRK

SEQ ID NO: 13807 - protein, 244 aa, Artificial Sequence; identical to SEQ ID NO: 13806
  Synthetic

SEQ ID NO: 13808 - protein, 244 aa, Artificial Sequence
  Synthetic
DEERLLKTILDVIRKVLKESKDILRRVEEILRRVIETAKEIHKEVKEIIEDVLRLLRENDKLEELVREVAKRLKEVIDRWREVVERVAETLKRVLEEHEEVVRRVARELEELLKRLREGEKLRAIEEVVKKVVRALEELSKELEKIVRTIVKLLRENVRRLEEILRRVVKLLRELVKLAKERSREEEIEKRVREIKKEVEDLLRRSEELLKELLDRIRKLLEELKKRHEDLLREVKKDLDEIRR

SEQ ID NO: 13809 - protein, 244 aa, Artificial Sequence; identical to SEQ ID NO: 13808
  Synthetic

SEQ ID NO: 13810 - protein, 240 aa, Artificial Sequence
  Synthetic
DEVEELLKRVRELLKRSEELVRKILEDVKRLLERSIEEVEDLLRKVEELLKRLLDLVERRKLLEEILRELVRLLKEIVRKVLELNRKLVEDVIRIAKRLLELNKESVKEWDRILKLLRDGTVDKKELLKDAEEALEKYERAVREILKELEEIIKEYVRRVEELLKELKDAVDKAKDEVRKEGSDEDLDRDVDRVLKEIMDLLRDLVRRTKELLEELLRLLEELVRRHKELVRKILDEIRK

SEQ ID NO: 13811 - protein, 240 aa, Artificial Sequence; identical to SEQ ID NO: 13810
  Synthetic

SEQ ID NO: 13812 - protein, 247 aa, Artificial Sequence
  Synthetic
REAEELLRELEELLKKSEKVLEDLLRKNRELIKDSKRRLDEVRRKVEKLAEEVEEVIRRGVSEEELIRVIKKVLDDLRRIIKELIEVSRKYLRTTLELVKELLDVSRDVLREVLRIIKALLDTIAKDNKEEKIKEIADVADEIRKLAEEDIRLIKKLLEESAKLVDEDVRKLEEIAKEITELVERLRRTTDKDAVRKLIEELKKLLEDLVEHHERLLKEDHERLKRLLDHHRELLKTVLTILRETAK

SEQ ID NO: 13813 - protein, 247 aa, Artificial Sequence; identical to SEQ ID NO: 13812
  Synthetic

SEQ ID NO: 13814 - protein, 238 aa, Artificial Sequence
  Synthetic
ELDEILRKVVEDSRRLVKELEDILREVIERTERILEEHRDLTRKADEDIRRILEEATRTKTDDELRERLKRLLDETAKLHRDVKKRLEDLNRDLLRLEDEILRRLEELNRRLEEVLRKKNKVSEKILKEHRELLEESRKRLEEIKKEHREMLKRSEDESRKILRDLEELVKEIDDKEDKKPKEEVLKDIVRVLRDVLKKANDLLKTHLDLNRESVKKVVEIARRHVKMNEDSVRKVEK

SEQ ID NO: 13815 - protein, 238 aa, Artificial Sequence; identical to SEQ ID NO: 13814
  Synthetic

SEQ ID NO: 13816 - protein, 238 aa, Artificial Sequence
  Synthetic
DVEDVLREVVERSRRLVEEHKRISEKVIRDTKRILDEHRELTERVIRRAKKLVDDARRTKTDEEVLKRFADLVRELLELHRRVKKKLDELNERLLRAHRTLLERLERLNRELLKLLRERNKVSEEIIRKHEELLKKSRRESEELIKAHETMLEESERRSKKILDEVERLLREIEKKARKKPKEEVLKDAVRVLEEILRKLNELLERHLKLNEESLERMNRILTRHVKLNKESADDARR

SEQ ID NO: 13817 - protein, 238 aa, Artificial Sequence; identical to SEQ ID NO: 13816
  Synthetic

SEQ ID NO: 13818 - protein, 245 aa, Artificial Sequence
  Synthetic
DEEELLRRVTEELKRLLDEARKLHEDVKRELEKLLKENDDLLRDVKRKLERLLEALKRGELTEDEVIERILRLVEELLKRHAETVERILKLVRDLLRLHEKLVKEILDLLTRLLELLERRKGEENREKVDKLKKLAKKVVDEVERSLEELRRLVEEVIKRIRDSLRRSARIVKEAVRELRELLRDVRDKDKLLERIRRLLETLLEVLKRDNEEIKRILEELLRVAEENLRRIKEIIDRLLDATRR

SEQ ID NO: 13819 - protein, 245 aa, Artificial Sequence; identical to SEQ ID NO: 13818
  Synthetic

SEQ ID NO: 13820 - protein, 249 aa, Artificial Sequence
  Synthetic
DEEEVVKRLADVLRENDETIRKVVEDLVRIAEENDRLWKKLVEDIAEILRRIVELLRRGGVPEELLDRLRKVVKRIVEKAEKILERLNRVSKAIAEKLKTIVDELNEVSKEIVKRAEDILRKVKDKETVLRKLRTLVKEYADLSKEVLERVERIVREYVKLSDEVVKSLREIVEELIRIIEDLLRKVNLDEDVKRALEELVKRLRKLLEDVKKKSEDIVREVERIVRELKKRSDEILKKLEDIVEKLRE

SEQ ID NO: 13821 - protein, 249 aa, Artificial Sequence; identical to SEQ ID NO: 13820
  Synthetic

SEQ ID NO: 13822 - protein, 240 aa, Artificial Sequence
  Synthetic
KEREEIRERVKRILETSRKLLEELAKAVEDVLRRSKELIDELRDAVRRVLEELERGGLEEELRRILEEVARILERLIRALEDLNRRAAEILRTLIDLAKKLHDELKRVIEELDKKPKSRELVEEAKRAVERYKRVVEELLDRLREAVERLRRAHEELLRDAARVVKELVDKLREVLKRVDEDRTKKIVERIIELIEELLRLLVKVVEDSVRLIEELLKLAEEVAKRSLKLIEDLLRAIEK

SEQ ID NO: 13823 - protein, 240 aa, Artificial Sequence; identical to SEQ ID NO: 13822
  Synthetic

SEQ ID NO: 13824 - protein, 247 aa, Artificial Sequence
  Synthetic
SDDEVIEKVKEDLRRLIKEAEDVVREYEKRLREVEKKLDEVVKESERLLRELLKKLEAGEKDVREIVRELLEVNKDVLRKVVEIVKELKKIDEDLLRKVEDIVRKLLEVIDEALRRVIESKKDVDRVRKIVEELRRKAEDVLRRIRELVRDLERISDETLERVKKLVKESEDLAREALDRIEKVNTDKKELIKILRDLARKHRELLKRLKELTREHLKRVREILEELLRVTRELVEEIDKILKDLKK

SEQ ID NO: 13825 - protein, 247 aa, Artificial Sequence; identical to SEQ ID NO: 13824
  Synthetic

SEQ ID NO: 13826 - protein, 240 aa, Artificial Sequence
  Synthetic
SEDEVLERIRRALERVEDEHRKVLEKIVEDLKDVLEKHKRVLEEAKRDLERIKEDADKGVPIEELIDKLRRLLEKLIERVRRITELLKRIIEEVARMLKEITDELRRIAEEVVKDTPEDERLKEVRRELEELLKENDKLIKDLVKEAEDLLDEDRKLISKVLRDLERLIEDLRDRLRDSDEKSLKDLLREVLERSKKLLEEHHKHLEEIVRRTKELLERHHRHLKEIIRRIEEILKRERD

SEQ ID NO: 13827 - protein, 240 aa, Artificial Sequence; identical to SEQ ID NO: 13826
  Synthetic

SEQ ID NO: 13828 - protein, 237 aa, Artificial Sequence
  Synthetic
SKEDELREVLERVKRLIETVKRALDEALDRTRRLIEELDKTSKRVLTTVKKLIEDARREDKRELLKKLAELIEEHLRTLEELLRRNKDLLREILELLEELLKELKRLLKELLENQERDEEVKRVLDRIRRLLDEVRKDLERLVEEVRKLHKEIEDRLRELTKRTRELLDKIRRLLEEGVDERDLLRELLRIVKEHVDEVRKLLDELRKVNEKIVDAVRKILEKLLKIATDAIEETRK

SEQ ID NO: 13829 - protein, 237 aa, Artificial Sequence; identical to SEQ ID NO: 13828
  Synthetic

SEQ ID NO: 13830 - protein, 251 aa, Artificial Sequence
  Synthetic
SEKERLMEEIKRVAEELRKTVDRLRERNEKVVRDIRETVREVEREHEDVVKELADRVRELRRTDALERLVKLLLDIIKRLVEESRKLVELVLKIIEDNVRALTELVKRLLRIIEELLRVLRDVEGKEELDKVKKKVRDELKKVEEEAERILRESERLLREVEDTVRRIHEEVERKLREVEKRIEDSNLSEEVREVLRRLTKILRDLLKRNKEIMEKLLRDLKELLKENKKALEDLLRKLEELLRRIAEAEK

SEQ ID NO: 13831 - protein, 251 aa, Artificial Sequence; identical to SEQ ID NO: 13830
  Synthetic

SEQ ID NO: 13832 - protein, 240 aa, Artificial Sequence
  Synthetic
SKEETTKRLLDRHLERDRELLDRAARTNEEILRRNREVLKELFELLKRILDRVREANLIKRELLREAEERVKEILKEVDDINEEYKRELERILDEVDKRNEETKRLLEEIVDELRRTGTTEEVIRKVLEVVRRNLEVHRKLLEDSIRLIRRLLEVTRELLERLIEVIERLLRALLEDKKELEEVLRELRELLKRLKKRLEELLREHEKLLEDYKDRLRKSDDDLRRSVEEIKKALDRLRK

SEQ ID NO: 13833 - protein, 240 aa, Artificial Sequence; identical to SEQ ID NO: 13832
  Synthetic

SEQ ID NO: 13834 - protein, 240 aa, Artificial Sequence
  Synthetic
SKLEDSAEKLKEHLKRDRELLKRAEDLLREILRRNREVLDELRRTLDDILRRIREENLIKKEALDEVKKEIEEVLRKADRANEKIKKAVEDIVRKAEEANRDTEEKVRRILEEVKRRGTTDEIVRALLRVLEENLRVHKELLEELLRVVKELVDLTRDLLRRLIEIIEKLLRLLKEDVKEAKEVLDRLEKLLRDARKRLKELLDEHEKVLEDMERRLRESLDDLRRSLDRIRKDLKRKTD

SEQ ID NO: 13835 - protein, 240 aa, Artificial Sequence; identical to SEQ ID NO: 13834
  Synthetic

SEQ ID NO: 13836 - protein, 243 aa, Artificial Sequence
  Synthetic
SEKERTKELLERLLKLIRELLKKLEDLNRDLLRRVKEVLDRLAELNEELLRRVEEVTRLRDEVDKDELTRRLREIIRRYEEELERIVRELERILTEYEEMVRRLLREIEELIDRVKKELDKLPRTEILEKVKKVIEKILDSIRKVIKASLESAKELLDELRRVAKASVRLVRELLRIAEEVKEKEKLTKLIKEIKERSKRLLEEVKRALEEVMKKNEKILRDVRDDLRRAREELREILREADD

SEQ ID NO: 13837 - protein, 243 aa, Artificial Sequence; identical to SEQ ID NO: 13836
  Synthetic

SEQ ID NO: 13838 - protein, 249 aa, Artificial Sequence
  Synthetic
REEEKLKETLERILRELEKLAKENKELLERILKRDEDLTRENKETLDRLLKRVEEVTRRKEDDDRLREILERIKEEVDRDVRKNEKILKDIEDEVREAVKRNETRLREIKRKVEELVKDLREKLKDVDRARRIVEELKKIIDKVLDDHRKMVRRLLEVIKKLLDLHRESVKKLKEVVKELLDILREVRGDREVEKVLRDIKRKIKEIVDEHRDMNRKIKEEIDRIDTEYKKSLKDIKKEIEEVLDEARQ

SEQ ID NO: 13839 - protein, 249 aa, Artificial Sequence; identical to SEQ ID NO: 13838
  Synthetic

SEQ ID NO: 13840 - protein, 240 aa, Artificial Sequence
  Synthetic
RKEEAIERIRREIEKVRRRLREVHKESEERIRRLEDEYRRALETSAELIRRILDELRKNRVREDDLRRDEELARKLEKLNKELLEALRRIVKKLEDLNREVEKSSEELVEELKRVLDSDLDRDELTEVAKRLKDKLKRILDELRRLHEELKEELERLLKRYAEVIEKLKEDLKRVLAEVTDKRVKDIVRKILRVIEENLKFVAEAVKKLKEIIERNLRLLEEIAKLLLDILEEVLKRLTT

SEQ ID NO: 13841 - protein, 240 aa, Artificial Sequence; identical to SEQ ID NO: 13840
  Synthetic

SEQ ID NO: 13842 - protein, 240 aa, Artificial Sequence
  Synthetic
REKEVIEDIKRLLDEILKRLEEANKETEERLEKLRKEYRELLEDSKRKIKDIEAELRRLNVPEEKLRLVRELVKRLEDLNRRLKKALEDIARRLRDLNRRVKELIKRLLEELKEVAESNLDREEVEKVIRDLIRRLEKILTDLDEVHERLKKDLEKLLEEYERTVRKLLKDLEEVLKRVDKEAVKEIVKRLKEVIKDNLRVVEELVRKLKEIIEDNLRVLREIAKLLKDVLEKLLRDVRK

SEQ ID NO: 13843 - protein, 240 aa, Artificial Sequence; identical to SEQ ID NO: 13842
  Synthetic

SEQ ID NO: 13844 - protein, 240 aa, Artificial Sequence
  Synthetic
DKDKRLEELLKRLKELNDKTFEELERILEELKRANERSLREAERILEELRRRIEERNLDKRLAELLKKLLDDLKRLLEEYTRTNEELLKRLRELLERYRETNKKLLDLLRKLLDEARRTKTDEDLLRRLEDILRKYEDEVRRLLKELEDILREYEDTSRRLLEELERIAKEAAERVSRIKDKDVKDIIRTILEVARDLLRLLEEDSRTNSEVVKRLLDLLREDSKANSEVVKRLLDVLRE

SEQ ID NO: 13845 - protein, 240 aa, Artificial Sequence; identical to SEQ ID NO: 13844
  Synthetic

SEQ ID NO: 13846 - protein, 240 aa, Artificial Sequence
  Synthetic
SKEETLKRLLDELEKRNRETVERLERLLKELEDRNRRSLEELERVLEELERKIEESNLEKELKDTLRRILEELRKLLEEYFRKNEELLRLLRKLLDEYRRTNEELLRLLEELLDTARRTRNDSELLKRLEDIAREYEKRVRRLLEKLKDILDKYRKTVEELVRKMEEILKEAKKTISRIERREVKDIVRKMEEVIRRLIEILRRDVELNLDVAKKLLELLKEDSKLNLDVARELLELLDR

SEQ ID NO: 13847 - protein, 240 aa, Artificial Sequence; identical to SEQ ID NO: 13846
  Synthetic

SEQ ID NO: 13848 - protein, 243 aa, Artificial Sequence
  Synthetic
RELELLDELLRRTERLVKEYLRVSKELLEETLKLLTELLKLSKRLLEETERLLRRDKLGDEEEIRRLIRRAEDSHRRLKEIIDRLFREAEESHRRLEDTIRKLKREAREVLKALERGERSLKEVLDVLDTLVKRLIKVLRDNNRRLEELLRRLVKVLEENARILEDLVRELIRAAREKLRDKSKTELLEEAVKRLETLLRRYKEEIRRVAKRLEELLRELNELSKRLEETLKKLLEDLREDAR

SEQ ID NO: 13849 - protein, 243 aa, Artificial Sequence; identical to SEQ ID NO: 13848
  Synthetic

SEQ ID NO: 13850 - protein, 243 aa, Artificial Sequence
  Synthetic
DEEETLRRLLERKVELAKEYLDVSKEVIDRTTKLLDEYLKTSKRIVDKTVELLERDDLGPKELIKRLKEELERSLRELEEEIKRLKRELEESLKKLKEIIDRLKEEAEKLLRVLKRGEKSEEEALRALAKLVRELIEVLRENDERLRDVLRRLIEALRKNNEILERVLRKLVRAAEERLRDKSLRERLEEARRRLEELLRELNEITKDLERKLEKLLRDLNELTKRLEEELKRLLDELKKRTD

SEQ ID NO: 13851 - protein, 243 aa, Artificial Sequence; identical to SEQ ID NO: 13850
  Synthetic

SEQ ID NO: 13852 - protein, 247 aa, Artificial Sequence
  Synthetic
SEEDELVKRLRELVKELIDAIREHLRRLEELLRELLKALEDHLRKLAELVRRIIEELRRTNAVDDKLLETLDRIVKRVAEEHKRLNEELERIARKVAEESRRLLEELERIVRKVETDIKDLKDKGGDKDAIARLVKELADVARRVVTEHARLVRELARAIKEVVKAHVELVERLLEVIKEVIDRGDVPEELKERIRRIVETIRRSLERLKEEADRIVKEIEKSLRELEERLERIVDTIRKLLEDAKR

SEQ ID NO: 13853 - protein, 247 aa, Artificial Sequence; identical to SEQ ID NO: 13852
  Synthetic

SEQ ID NO: 13854 - protein, 251 aa, Artificial Sequence
  Synthetic
SEDDVLRKLLEAIKKLLKETKEILDRYLRESDRHNKALREILERLLELIKTLLEDLVRRTGKVKDLDKLAEDVKRVRKRLEEILEDNKRKSEEIARRLDKILDEIRKRVEDVVRELERITREVKDKDTLVREVVRLLEELLEVARRVVKRLEDLVRENNRVNNEVTERLVELLKRLLELTDDLLRKLRKDVPEEALKEIKRKLRELEKEIRKVVEDSRRISEESLRRLEKALEDIERILKKLSDEIRTDAT

SEQ ID NO: 13855 - protein, 251 aa, Artificial Sequence; identical to SEQ ID NO: 13854
  Synthetic

SEQ ID NO: 13856 - protein, 233 aa, Artificial Sequence
  Synthetic
DEEEVTKEVERLNRELLKRLREIVEETKDLNRRLLEILEELVRRTEKLLKDVLEIRKRGEKDERVLRDLKRTVEELIKRAKDALERYERDLRRIEERLKKLLDDYRKVLEDITRALPRDEKVERLVRLLERSLEVIEELIRLIVKILRDSLRVVKELIDRIVRIMERILELLRKEKDKDRLREELKKLLEELRRVLEDAKRKSEELSRRLEEVLRRAEEKNKEIMDRIRKARE

SEQ ID NO: 13857 - protein, 233 aa, Artificial Sequence; identical to SEQ ID NO: 13856
  Synthetic

SEQ ID NO: 13858 - protein, 235 aa, Artificial Sequence
  Synthetic
KEKEELLEEVERKVTELKKRSEDLVRKLDEEVKRLEREHEELLKKLRDAVEELRRAKLEIDDLERTTRELTREHEETLRKSLRELERLLEDHVRTIEKVLKDLRKILEDVAKKTRDDERLKELTKRLEEAAERLRRDHERLLRDLERVMRELKKLHEDARRELERVVREVKEEEDRETVLRKIIRLVEELLKILARINEEVKKLIRKLLEILTRINKKMIEVIDELVKIIREAAT

SEQ ID NO: 13859 - protein, 235 aa, Artificial Sequence; identical to SEQ ID NO: 13858
  Synthetic

SEQ ID NO: 13860 - protein, 243 aa, Artificial Sequence
  Synthetic
SEEERTKESLKKVLKALVDLNRELLRKLEENMRELTKLNEEVKRKLKEVLDKVRENGIVDKDAEREAERLMRELDKSSEDTKRETRKLIEESKKSTRRTEEEARKLTETLDRLKEAGLPREDLLRALVRLLEELARLIEEDVRRNAELVKRHIELVERDVRELLRLIKELVDLLRDLAEKLRRTEEIRKIVEEILKEIKELADRYREEVRKSKDKLRRILEDYKRKVDELKERLRELIEEVET

SEQ ID NO: 13861 - protein, 243 aa, Artificial Sequence; identical to SEQ ID NO: 13860
  Synthetic

SEQ ID NO: 13862 - protein, 239 aa, Artificial Sequence
  Synthetic
SLKELAEEVLRRILELLRRIIEIHERSLERSNRTLKKLIDEIERVMREILETLKRALSIKDKEKLKEVRDRLRELLTELLRRAEEIAKENERLLRENKKRLKKIAEELRKLLEDLKRRLSGGPDKLERILREETKLLEDILRRIEEVVKEHEKLNREVLKRLKEILDRTRELLKKLADEDSRDRTLLEEIRRRVEKVIREARETLREHRERVERSIEELRRMLEDVERIVREAIERLRR

SEQ ID NO: 13863 - protein, 239 aa, Artificial Sequence; identical to SEQ ID NO: 13862
  Synthetic

SEQ ID NO: 13864 - protein, 239 aa, Artificial Sequence
  Synthetic
SEVEDILRRLAELNKRLIDKLRELIDRIRRLNEELLRVVEDILRRLKRLADELIRVVRERGDIPEELLRKLEEELKKIVDELRRLVEEYEKALRDLIKELRKAVEEYRRTLAELVERLRRLEEPEELLKDLAEDVRRNIKAVEEVIRRFEKNVEDNIEVVRRLVDALEKLVRRLEKVLRDKLRDEDLKRLLEKLKEDVERVLKEVRDRTRESLKHLEDVIRELEKKTEDSLRHMEERRK

SEQ ID NO: 13865 - protein, 239 aa, Artificial Sequence; identical to SEQ ID NO: 13864
  Synthetic

SEQ ID NO: 13866 - protein, 239 aa, Artificial Sequence
  Synthetic
SKEELVKEALEENVRSVEEVIKLLKDALDENLKVVERVIRELKRALERVKDVIRKLIEQRELLRRAEEELDRLEEELKRILDEYRKRVREIKEKLKKLLEDIRRVHEELERRLRREGPAERLLKELKELNKRIREMTERINREVRELNRALLEKIEDLVRRLVELLERVKERLKDNGRLDKKVADELKKLLDELKKILEEIRRMLEEANRKHDDIVRDIRRVLEENDRKLEKIADDIRR

SEQ ID NO: 13867 - protein, 239 aa, Artificial Sequence; identical to SEQ ID NO: 13866
  Synthetic

SEQ ID NO: 13868 - protein, 239 aa, Artificial Sequence
  Synthetic
SKKEELEKLLDTNLTEIRRLLKRVKDVLDRNLEVVRRVIEELARLLDEVTEVVRRLIDDEKLLREVEKVAEDIKRELERILREYEKLVEDIKRELKRLLEELERAHREIKKEVERDGPDDRVLKKLKELNDDLLRAIKEINDKVKKLNEDLRKKIEKIAREVLKLIEDVKRKLKEKGRLDEKVKRELEKLIKRVKDILDDIRRRLKKVNEEHEREADRLRRELERLDRELKKRMDDIRR

SEQ ID NO: 13869 - protein, 239 aa, Artificial Sequence; identical to SEQ ID NO: 13868
  Synthetic

SEQ ID NO: 13870 - protein, 236 aa, Artificial Sequence
  Synthetic
DEDEELKERTKKSLEKLRRLLERLEKIIRESLDKLRDLLRLLEEALKRILDELRRNNVVSKDLLTELKKLLDRLREEVKRLLEESKELVKELKKRVDELLTESREAVKDLERKVRREEGEEKLLRLVKRLLERHLELSDRIARLVVKILEDNLRLIDELVKIIKELLERVLEVVRRVVRDRDKLEKIERDIRKIIRDLEEIARRLKEDHERVIKELRETVKKHKEDLEEVIRELRR

SEQ ID NO: 13871 - protein, 236 aa, Artificial Sequence; identical to SEQ ID NO: 13870
  Synthetic

SEQ ID NO: 13872 - protein, 234 aa, Artificial Sequence
  Synthetic
REKEDVARRIKRIHDELETRIRKLARDLERIHRKLKEDIERLVREAEKKLRELEKKTTDDKIKTLIDRTRKTLEDLTDEIRRLLKKHLEDLKRLLDDIERVLRRHLRKLKELLDVARRNEVPDKEVRDEIRKSSRELEDILRRLREKLKTLHEEVRRAVERVRKKIEDLEREVRREGVPEEIERLVEELKKILETILKLIAELNEEVVRLLEDILRLVRELNERVAELLERAEK

SEQ ID NO: 13873 - protein, 234 aa, Artificial Sequence; identical to SEQ ID NO: 13872
  Synthetic

SEQ ID NO: 13874 - protein, 243 aa, Artificial Sequence
  Synthetic
DEERIIKTLEDINKKLVEDIKRILDKVRELNERLADAIRKILEETKRILERTTRKVRKDGEISEELLRRLEEKLRKLLEDLERVLREHEDESRRILEEVERLLKRHKDRSKELLDRARDVKDRVKRDKELVDRLKKLIDDSLESVRELIERLKELLDRLVKSVEDLIRTIKELLDRLVEVLREVVSDKDTLRTVEKLVEDVKRRLDKLLEDYKRLIEEVKKELDKLLKEYEDRLREIKKRIDE

SEQ ID NO: 13875 - protein, 243 aa, Artificial Sequence; identical to SEQ ID NO: 13874
  Synthetic

SEQ ID NO: 13876 - protein, 244 aa, Artificial Sequence
  Synthetic
DLEDAIRELLRRLTELIEELVRILEELNKRLNDLVRRLVEILRRINELLKKLVDRLRKDPDASEDLKRVVEEARRLHREALERLKEVVRELRKLHDDARKRLEDVRRELEKRLEDVARRTREDEKLERLRKAIKDILDKLEELLRKHLEDVERILRELEELLERHKRMLEKLLKDLEDLLRRRVEERELKKVLDDIREKVKKTIKEIDEVLEKITRENERTRKEIEEMLRTLRELIKRLLEETK

SEQ ID NO: 13877 - protein, 244 aa, Artificial Sequence; identical to SEQ ID NO: 13876
  Synthetic

SEQ ID NO: 13878 - protein, 239 aa, Artificial Sequence
  Synthetic
SEEDEVAKTLEDILRRLEELLREHHELHRRILEELEKLLRDHIKLHKDILDEATKSTDDLEKLADEVRKKLRESLKTLKKIVEDIERKLEESKRRLKRTVEEIRKKLKELLERIETRNLDERLLRALRELVRLLEEILRRLLELLEEDVRLLKEILRELERLLREDIKLLEEILELLKRRPDSKETLKRLKDRSKELNDRVRETLKRLAERSKRLNEKVEEDVRRAVEELRRLLEEIRK

SEQ ID NO: 13879 - protein, 239 aa, Artificial Sequence; identical to SEQ ID NO: 13878
  Synthetic

SEQ ID NO: 13880 - protein, 227 aa, Artificial Sequence
  Synthetic
DERKVIEDLVEVLRDLLRVIKEVLDRNVKLIKDLLRLNLKVAEELIRVLKELLDRLRRDKDLRELEERIKRVLEEHEDVIRRAAEKVEKVADDSRKVIEDISRKVEALSRRNLEMDTLAELAKEILKLIEDLLRDHKRKTDRLLEELRELTKRTARKLEKILEDIVRKTGETEELDRIRKELKRLLDELTKLHEDVRKKSEELVREAERTLEDVKRKLDELLERAKK

SEQ ID NO: 13881 - protein, 227 aa, Artificial Sequence; identical to SEQ ID NO: 13880
  Synthetic

SEQ ID NO: 13882 - protein, 244 aa, Artificial Sequence
  Synthetic
DEERELERLLEDVRRRHEELLRRLEKLLEDIRKLYEDVRRKLKRLLERVDRLVREILRRDKRDKVREVIKELLEVLRRVVERIEELIEESLRVDERVVEEIKKLIEEHLRVLEEAVDRIKKKKDDEETMREIIRELEEVNRRLDEEVKRLKRENDEVLRRVKEALKRLAEELREALKRLEERTGRDELIKELADIVKEILRLAEELAKELEKINRELDRVTRELIKDLLRISRELIKRLEDTTR

SEQ ID NO: 13883 - protein, 244 aa, Artificial Sequence; identical to SEQ ID NO: 13882
  Synthetic

SEQ ID NO: 13884 - protein, 238 aa, Artificial Sequence
  Synthetic
SDKELLDDTIRKMRKLHRDSVELLDDIRRKLEELLRKVRELLDRNVKKIRELIELRKKTDERELKKRVDDIERENEEALRRIAEEIKEIKKKIDRAVKEYKTELRKLKEKLKDALRRVSDEKVKEVIRRLLEALDRNAELNEDVLRRILEMLERILETIKEIIKKNIKSLRELLELIARGSRDSDLEDLIRRDIEELKKVIEKLEELVRRIEELLREAKERDKESLDRIEDELRKAKK

SEQ ID NO: 13885 - protein, 238 aa, Artificial Sequence; identical to SEQ ID NO: 13884
  Synthetic

SEQ ID NO: 13886 - protein, 238 aa, Artificial Sequence
  Synthetic
EEDDLLKANLDTLRELHKESEKLLRDIEETAKELHKKSEELLKRITDELDRLVKLSRKVDDKVLEELIRRIVREIEKMVEDYERELRDLVRKIEDAVRRYEKKVREIEKRNKEFLKKVTDEKVKEVIERNLKTIRENVELNKEILRRIIEVLRENVRLNREVAKELIRVAEEILKLLRAGSRDSDIKRILDDLRRRLEDALRRDRETLKRLKEEIERVKKEDRRSLERDKEELEKARK

SEQ ID NO: 13887 - protein, 238 aa, Artificial Sequence; identical to SEQ ID NO: 13886
  Synthetic

SEQ ID NO: 13888 - protein, 235 aa, Artificial Sequence
  Synthetic
SAAELILKAAKEAAEANREAAELALKAAEESARAAREAAELALKAAKEAAEAARRGAEDKDTALKLVDEAVRKAEEALRRANEKNRRAVRKAEEAVKRAAEKNRRAVEKAKEAAERGRADEKKKRRLEELAKRTEDAIKRILEELKKLAEDSEEIDRRALKALKELADEAREIAKANLDKDDLTRAADELLKKAKKLADDYKRAADRLLKEAEDLAREWKKLADKALEDAKRDAD

SEQ ID NO: 13889 - protein, 235 aa, Artificial Sequence; identical to SEQ ID NO: 13888
  Synthetic

SEQ ID NO: 13890 - protein, 235 aa, Artificial Sequence
  Synthetic
KAEEAAKEAARLAKEDADLAKKAAEDAAELHERHAKLLEDSARTAAELAKRLAEAATVDEAARLLKKAAEDYKKAADEAARLNREAAKEAEKAARDAAKLNREAAEDVKRAAKDRLREAVERAKEALKRSLDLAKEAVERSKEALKRSVELNARAVEIAKEALKEALRIAAERAERKEDLDRLAKIAKEAADALEELLERSKESAERAARALEKLLKEWADSAKKAADALEELDR

SEQ ID NO: 13891 - protein, 235 aa, Artificial Sequence; identical to SEQ ID NO: 13890
  Synthetic

SEQ ID NO: 13892 - protein, 237 aa, Artificial Sequence
  Synthetic
DELETLKKEAEDVLRELRDILRKLEDLSRKTIEDMRRIVEEVLKLNEDSIRELKRIIEELDSKDLMDTVEKVVKRNLEIAERVIERLLELVRRNADIARRVIEELLKVLERLADIVRKRIKSEVLREIKRVAEEVLKKVREVLKRHEDAIRKVLERVRDVAREHRRVVKEVLEDVKRAGGLTDEVVKKLEDVSRKSIDDLRKIIETLREVVERSIEEIERIIRDLERVIREIIEREK

SEQ ID NO: 13893 - protein, 237 aa, Artificial Sequence; identical to SEQ ID NO: 13892
  Synthetic

SEQ ID NO: 13894 - protein, 240 aa, Artificial Sequence
  Synthetic
SKIEELAKIAEEHAELNRRAARKNNEIAKEAAELWKRAAEKHVRIAERAADAIRKAAKSEAAKTALKLIKENAEDAKEAARRALELAKESAERNTRAAEEADKLSKDAARTAREARREDALKKAADKAAEASRRAVELNKKAAEDHHRANETAARLAERASRHLIEALERAVRAAARELEDEKALREAKELAERAARENREALKEAKELAKRNSEKAKESAKEHKKLAEDANKRAEEATR

SEQ ID NO: 13895 - protein, 240 aa, Artificial Sequence; identical to SEQ ID NO: 13894
  Synthetic

SEQ ID NO: 13896 - protein, 240 aa, Artificial Sequence
  Synthetic
DEEEVIEEILKTLEEINRRVLKLIKDILEKVKRVDDEIKTLVKEVLRENERVLREVREKAKVKDLVKELLKRVREVAKIHREIVRRHLEILERILEEVAKVVEEHIDALRRILELLERVIRDEEVVKEVRKLVEDVLRASREVLERVTRLAEELIRESKRVLDTSRKLIEEIEDRLRKVRSEKMLEDILRRLEEINRTSLRLVDEVSKKTREVLERILKLVKEVLDESRRVAKKVKDDLK

SEQ ID NO: 13897 - protein, 240 aa, Artificial Sequence; identical to SEQ ID NO: 13896
  Synthetic

SEQ ID NO: 13898 - protein, 229 aa, Artificial Sequence
  Synthetic
SAVDIAREAARRVIELLKRSAEAAEEAARRSIKLAKESADAAREAAKKVIEILKRAADEDRALKEIEDLARELRKASKEVLEEDERLARELEEISRRVLDEIRRLAKELEDKATKKKAEKAAREIERAAKEHLEVNKRAAKRSKDATERHLEANDEAAKRIRDAADEVRKRGEEDAARKAAEIAARAAKRSADTAKRWAEVAKEAAEESAKSAKKAAKIAEDAAREIEK

SEQ ID NO: 13899 - protein, 229 aa, Artificial Sequence; identical to SEQ ID NO: 13898
  Synthetic

SEQ ID NO: 13900 - protein, 231 aa, Artificial Sequence
  Synthetic
DLREAAKEAIDAAEEAARRTEEAAKENIRALEEAAKRTRDAVRRAIKAIEDAVRDAGSTDEAVKIVEDAARDALRASKESIDIVREAAKRSLDASRESIKIVEDAAKKAEDAARKAGRDASRAAELAKRAAEADKRAAEEDARLNEEAARADRRVAEELARLAEEVADAAKKADKREDLERIAREAAERAKELADRLEEIYRRAAEESKRLAEELKRIYKRAAEEAKKAAD

SEQ ID NO: 13901 - protein, 231 aa, Artificial Sequence; identical to SEQ ID NO: 13900
  Synthetic

SEQ ID NO: 13902 - protein, 242 aa, Artificial Sequence
  Synthetic
SKIEELMKLVEKIIRKTLDLVRKHAEVSKEVLKEYIRISKEHLDVSKRVAEELKKEIEVKRLLEEVERVAKKVVETNKRNIETVERVLEDIKRTNTELLKRIEDVLREAVRVAEVLRRGDSDKEEVVRRIKELLKELLKVIREVVEKDKRLLDELLKSNADVVRTDEELLRRLLRVVERDVERKEDLDRIRDTLRRVIERSKRIHDRLREMLEEVKRRSEEIVERIERELRDVARKLEETLR

SEQ ID NO: 13903 - protein, 242 aa, Artificial Sequence; identical to SEQ ID NO: 13902
  Synthetic

SEQ ID NO: 13904 - protein, 243 aa, Artificial Sequence
  Synthetic
SLTEELRRVVKEIEEVVRRDVRTLEEVVKKITEVVRRDDKSLREVVKRNEELVRLLARGDRRDEDVLRAVAKSNKELLDSSREVLKTVADLLRRLLESSKRVADRVEELARRLLKMVKDSGKDDRKLREKLKKILREYRERLKEVAKKIRDALKRYEDILREIEKKNRDVLKRAEELRSKDTSEKDRREILRELVELTERSVEEIARVNKELVDIVRELVKELKRLNERLVELVKRLVEETAT

SEQ ID NO: 13905 - protein, 243 aa, Artificial Sequence; identical to SEQ ID NO: 13904
  Synthetic

SEQ ID NO: 13906 - protein, 241 aa, Artificial Sequence
  Synthetic
RAIETLVDVVREAIEINKRLVDRNVESNKELAKLNRDLVRRNRESNTELADLVRRDKDVDRLREEAKRVLEENKRLLDELRERHERVLKRNEDLLREVERLHTRILRDLREIVRRDNSRKEVLERLERVVRDILRSLKEVLDENAEVVKRILKSLEDALRENERVVREVLELLKRVRDQDREEELKRVVDEIVELLKRVLETTEKVVRDNVRLLEKALRSSKKVLDENVKKLEDVLRDLKR

SEQ ID NO: 13907 - protein, 241 aa, Artificial Sequence; identical to SEQ ID NO: 13906
  Synthetic

SEQ ID NO: 13908 - protein, 241 aa, Artificial Sequence
  Synthetic
SAAEALAKLAKENAELNRELAERNARSNKELAELNEEAARRNAKSNKELAELARRERDVDELRRRAEEALRRNKELLDKVRRDHERALRRNKKLAKEAEERHKKSLEDAKRIAKRDKAREEALRSAEEAVRRALKSLKDALRSNEEAVRRALKSLKEAADENEKAVKEALDLARRARDDDTEEELKRAIEEAAKLLKRAADETRRAAKENAEALEKAARESKEAAKDNAEALKKAAEEAKK

SEQ ID NO: 13909 - protein, 241 aa, Artificial Sequence; identical to SEQ ID NO: 13908
  Synthetic

SEQ ID NO: 13910 - protein, 232 aa, Artificial Sequence
  Synthetic
TEEEVVEDVKRVLDESHDDLRRLIETLTRVLRESLKRIKEALEELERVLKKLLDLLEGGRDKREVLDEIRKVLERLREVIEELLRINKEVLRELERVIRELLKKNEDLARRVRRDVKSRLLEVLERLARESLELNRRILEELRKLVEKSLRAVEKILKRLEEIVRKLLKLVEDNKPREEVKRVLEEARDELRRLLEEYKKIIEELERELERLLREHREVIRRIKEEIDKSSK

SEQ ID NO: 13911 - protein, 232 aa, Artificial Sequence; identical to SEQ ID NO: 13910
  Synthetic

SEQ ID NO: 13912 - protein, 234 aa, Artificial Sequence
  Synthetic
SEVERAVEDVKRALEENVRLSKELVDRVTKMAEDNVKLTKDIVDKVRRILEELVEVIERGGSDDTRRELIDKARRLLRKLRDELKESLDDARRLLEDIKRLIEESVKRLRDLLEKIRREKSLPEDLLRLLREVLEELKKINDELLDAVRRVLENSARVLETLLKLIEDVLRELERVTDKDEVRKIVRELVEEAKKVVEYDTENAKRVVEELKRVVKRDADVVRKLVELLDRKAR

SEQ ID NO: 13913 - protein, 234 aa, Artificial Sequence; identical to SEQ ID NO: 13912
  Synthetic

SEQ ID NO: 13914 - protein, 235 aa, Artificial Sequence
  Synthetic
SELEEAVKRVRDALRENLDSIRRLVEKIRRVLEEHNKLSKELVDRIEEVLRRTVEAVKKDKPEEDLRRDLERVLEELTRLVDEVRKTNERALTELEKLVRDDKRKLEEVLRELRERLVKIEELLRRLEEVIRRSLRSLEELLKLLERVSRELVEVLRELLELLRKVVKRLLDLLRKGSDKRDVARVVRELIELVKRVLERDKRIVDELVKLVDEVLKRNKEIVDELVRLVDEARR

SEQ ID NO: 13915 - protein, 235 aa, Artificial Sequence; identical to SEQ ID NO: 13914
  Synthetic

SEQ ID NO: 13916 - protein, 238 aa, Artificial Sequence
  Synthetic
SELEDLIRLLREVIKRLEESVKELVDIVEEAIERLRKIVKELIDLSRKVIDELLELGVEERVIKKAKEASEEALRKLEDVIRKLKKILEDVLKKLKESIDELLREVDELLKRPQDKEVLREILERLRELLRRHTKVLREVIKEIADALEEVLRVIEEILDLHRRLLDEIRKVLERAGLPEELLDRIRRLIEESIKKLARIADRLRKLIEDLRRLLEELLRRNEELIERLERMLDEKAR

SEQ ID NO: 13917 - protein, 238 aa, Artificial Sequence; identical to SEQ ID NO: 13916
  Synthetic

SEQ ID NO: 13918 - protein, 238 aa, Artificial Sequence
  Synthetic
SEKEEAAKAAEEAAEIAERADEKAARSSKEAAKIAEKADKEAAESTRKALDDARRALEEAPADTRARDLARKLAREAEESLKEHKKISEELKKRLDESLKEHREISERLKKELKELREADRDLDELARELERLAKEHADSLREHARRSRELAEEHVKSLKRHAEESEKLAERAAREASDEDAARRAEKAARENADSIRRAAEKSRKAAEDNARSIEKAARESEEAAERAARILKRAKD

SEQ ID NO: 13919 - protein, 238 aa, Artificial Sequence; identical to SEQ ID NO: 13918
  Synthetic

SEQ ID NO: 13920 - protein, 229 aa, Artificial Sequence
  Synthetic
KEVEDVVEKLRELIDRALDRNRKVVEEVRDVVRRALEENRKVVEEVRKVIKEILDRVDDETVRTVVELLERLLDEHLRIVEEIVRLLTDLLRRHLRVVEDIVRLLRELLKILTELRRREELEKIARRLLETIDRLIRTLERLYDEAREEIEKLIRELERLYREVDKRIKEAGLPKEATDLIRELIERLRKVLEKSRRLIDRLVKLSRDVLEETKRLVEELIREVKRAET

SEQ ID NO: 13921 - protein, 229 aa, Artificial Sequence; identical to SEQ ID NO: 13920
  Synthetic

SEQ ID NO: 13922 - protein, 240 aa, Artificial Sequence
  Synthetic
KLEEIVKKLEDLNKKAVEILRRVLEEHEKLVEKVKKVLRDVLRLLEKVVREVIETLKKKDTDEKVREALKELEEVVRKIKEEVEKVLKRLEEVSKRLKDEVRRVLKESEDVAKKIRRDVRRVRSKDAAKRATDLLKETLRILEEAIRRIVKVIEDSLEILREAVERIVRLLEELLKILARIGLDEEVLRKLKEIIKELKDRLKKLLDDYERIIDELRRELERVLREYEKILEDLRKELED

SEQ ID NO: 13923 - protein, 240 aa, Artificial Sequence; identical to SEQ ID NO: 13922
  Synthetic

SEQ ID NO: 13924 - protein, 237 aa, Artificial Sequence
  Synthetic
SELEEAAKALERIAKKAAKAARDWAEEDRRLAEEAIRAAEEWAKENKKLADELAKAAKDNRDEKDLRRILEEVKKRSEKLAREAKKVLKRIADDSKRLAEEAEEVLKRAADELKKIADELRKRGAGAKEAEDVAKKALDAAREAVEEAKDVNREALKLAEEAVREAERVNREAARLAEEARSDEAVRALEEAAKRSEDAARKAAKLARDAAEKSRRAAEKAIRLLEEAAKEAKDAAR

SEQ ID NO: 13925 - protein, 237 aa, Artificial Sequence; identical to SEQ ID NO: 13924
  Synthetic

SEQ ID NO: 13926 - protein, 239 aa, Artificial Sequence
  Synthetic
KEAEEIAEAVKRLAEASAKTAEELARAVRKAAEDLVKLAKEHADALRTAADRIAKLIEAEEAARKALEAAKKAIEDNERAAKEALEAAKRAIDIIREAAERSKKAAEEAIDIIRRAKEGREDIERALRELLKANRKAVEDAKRALKELADAAREAVKKAKETAERLIEAIKRAADEAPASEDIRREIKRIADELKEITKRLEDEVEKIIRRLEKIAKEAEDRHRKLAEELRRIAEEAKR

SEQ ID NO: 13927 - protein, 239 aa, Artificial Sequence; identical to SEQ ID NO: 13926
  Synthetic

SEQ ID NO: 13928 - protein, 241 aa, Artificial Sequence
  Synthetic
SVDEALEELVRRLLEVLKTVLERTKELSRDDLRVVKEVLRIIEELVKRLLKVIRDGLDDADRVLEEVERVIREAKREVKRWEEVVRKVVEDSRRLIERVLREVEEVIKEAKRLLDERKLGGRREVIEELLRLLREIVRHHKEVSDEHLKLSAELVKRILDVVEETLRLATEIVRRIKEEGNSEDVRRDIERLLEELKRRVERLLEDIERLLRELEKLNEDVLRENKKLLEDLERRVRERKK

SEQ ID NO: 13929 - protein, 241 aa, Artificial Sequence; identical to SEQ ID NO: 13928
  Synthetic

SEQ ID NO: 13930 - protein, 237 aa, Artificial Sequence
  Synthetic
DEERIVREIVKIIEEAVKELVRLVREDIELVKDVVRRHNRLNEEIVKLWKELVDEVLKSRDAEELRRILERIKRLHEENSRRLKEVVERWVKLLKESLEKLEDVARKAREKLKTVLDKPRGEELIKDLARVVEEVLRLLEEVIKTHAEINKRALELLKEVSKHAADIVREALKLAAEVVDDKDLLRRAEEEIRRLLKENEDILKRVEEEVKKSNEELRRILDRVRRELEKALKRLRD

SEQ ID NO: 13931 - protein, 237 aa, Artificial Sequence; identical to SEQ ID NO: 13930
  Synthetic

SEQ ID NO: 13932 - protein, 243 aa, Artificial Sequence
  Synthetic
SKEEEVKRLIDELKRVNERVNKTIKELVKLLEESHEEVLKEIERLIREVLRVIKEVIEAVDKDRKLERLEEKVRKVVEELKRLLDRSRRILRELIKTIDRLLTEHRKEVDKVVRELRELLRAGADAKELLKILEDLLRKSKEVVKRILDIIRKLLEDSRKVVEELVKLIADLLEEILRALKEGRKEALDKLVDAARRVLEAVRDVLRKDERSVERVLDEVRRVAEELERTHREVVKRVEDAAR

SEQ ID NO: 13933 - protein, 243 aa, Artificial Sequence; identical to SEQ ID NO: 13932
  Synthetic

SEQ ID NO: 13934 - protein, 243 aa, Artificial Sequence
  Synthetic
DKEKTVADLIEKVERSHERVLKRLAELIEELKRVNERVNREIERLIRELEEVIDRVIKAVDPDKKLEELEKKVREVSRRLEEILRDHERLVRKVVEELKELLDRSRRLVREVVRKLKKLLEDGSDAKDLLRIIADLLRLSDEVVKELLKLNEKLLKLSEEVVREILKLVKDLLEDLKRALEEGRREMLEELVRVARRVLEAIKTVADELRKRHEEVSREIERVAEEDKRTVEEVLKRIEDAAR

SEQ ID NO: 13935 - protein, 243 aa, Artificial Sequence; identical to SEQ ID NO: 13934
  Synthetic

SEQ ID NO: 13936 - protein, 233 aa, Artificial Sequence
  Synthetic
KDEEIIKRLEDLLKENVDRLREILERVERTHRKVIEELKRILEELEEILRRVIEKLRRKNTLDDKLIKKIEEVLKRLLEVLDELLKRIEKASRESLDSTRRLLDSHEKVLREALRVLREIDGERVLEEVKRVVEDVIREWEEALERNKRVVEKLIKTVEDILKRIDEVVRRLIEAVESRDVERLLKELKRIVEEILRLVRELVTRDIDALRRLLESVRRLVDKLIRIVEERRR

SEQ ID NO: 13937 - protein, 233 aa, Artificial Sequence; identical to SEQ ID NO: 13936
  Synthetic

SEQ ID NO: 13938 - protein, 242 aa, Artificial Sequence
  Synthetic
SDKDRLLEEIKRLIDESRRKAEEILKRSTELLEDSKRDLREILRRSEKILDELLDLIRRNELPEKDLLRELEEVVKENLELAERLSKKLEDIVRENRDLLEKLSRLLVKILKEIVKMVEEAGLDEELTKLIEEVLEDNKRAVKELEEKLKESLKRNKRVVDDLRDKLRKSLEELKDVVTRLRSKEIKDALRRVLEKHKKVLREAIKKHEESLEEHRKVLEEIIELHKRSLKKLEDVIDTVRK

SEQ ID NO: 13939 - protein, 242 aa, Artificial Sequence; identical to SEQ ID NO: 13938
  Synthetic

SEQ ID NO: 13940 - protein, 236 aa, Artificial Sequence
  Synthetic
SKEELIKELKETVKRIIKLLEELSKKMEEIIKRIAELLRELSKKLVDIIKRIIELLRREGAEEEIVKRLDDVAKKNNEAVREIVEELRRIVKENREAVERVAKRLRDVLREVDRVVKELTGEDLKRELDRVLKLLLRILEDAVRELKRSLDEVRKVLKRVVEMHRTSLKELEDILRKVDVREEILKEIKRLLDESKERLDRVLREIEELLRRYEEEVRRVLEEIKKILDELRERIR

SEQ ID NO: 13941 - protein, 236 aa, Artificial Sequence; identical to SEQ ID NO: 13940
  Synthetic

SEQ ID NO: 13942 - protein, 234 aa, Artificial Sequence
  Synthetic
DTERAADEARRRLEKLARDHKEKLKKAAEDLRRLLEEAERAHRKIEKELEELTRKVRDLERAAEELLKLAEEAAKASEEAARRLLEIAERIAKSNEDAARELLKIAEDLARRAEKEEAARRLLEAAKRAAEDSRESAKDLLRAAREAAEKIKKSARELLKAAEDAAKTIRDAKDREDAERALKEAADRAREALRRNLRALREAVREAEEAIEKDARAIDEALKKAREAIEEAER

SEQ ID NO: 13943 - protein, 234 aa, Artificial Sequence; identical to SEQ ID NO: 13942
  Synthetic

SEQ ID NO: 13944 - protein, 238 aa, Artificial Sequence
  Synthetic
SKVEELAERAARSHKELADAIRELAREAAESHKEAAEVVKRLADEAARAAKEVAKAIEDETAAKILEEAAREALRAAEEAIKLLEDSAREVLRLAEEAIRLNEEAAKRVLDAAREAAELEDKEAVDRALKRALKISRDALEEAKKIAKEALELSKRAADEAARIAKEALETAEDALRKAVRDRKVLEDAKKILEDLRKKAEDALRKHKKILDELEEKAKKAAEKHERILRKLDEDAKR

SEQ ID NO: 13945 - protein, 238 aa, Artificial Sequence; identical to SEQ ID NO: 13944
  Synthetic

SEQ ID NO: 13946 - protein, 242 aa, Artificial Sequence
  Synthetic
SEDEEVLKDIKRLLEEVKKTLEEVAKRHEKALREIEERVKEIVKEHEDLLKEVEDKARSNTIDEKDLVEMLRRIHERTVKLIDELVKTLLRLNEETVKALEDLVRKLLKILKDVLERVKDKRVLDLIRELIKKVKDDADKLLELLREVIKRSADIAKEIRDLLDKVIKDSERILDEARRLKNKEDLDRLLKEVLDISRKVLEEVLKIIKRVLEISKRVLEEILRRIEKVLRDIDRVLKKLRE

SEQ ID NO: 13947 - protein, 242 aa, Artificial Sequence; identical to SEQ ID NO: 13946
  Synthetic

SEQ ID NO: 13948 - protein, 238 aa, Artificial Sequence
  Synthetic
SREEDLARKIAEAVKELLDADRRLLREIEKLAEELLRINEELLRRLEELARELLEAVDDERVVDELRRVAERIRRVVERATRELKRVLDEIRRISEKSIRDLEKVLEEIRKIIDDVSRLERKEEVLRVIKEILERLEKVLEEVRDVNRKILERLKEVLEEWERINRELLRIAREVLEKVKVEERLLRKLEEILRRLKDESRKVLKKVKEILDRLKRETEEILDKVRKILERLEEEVRR

SEQ ID NO: 13949 - protein, 238 aa, Artificial Sequence; identical to SEQ ID NO: 13948
  Synthetic

SEQ ID NO: 13950 - protein, 238 aa, Artificial Sequence
  Synthetic
SAEEAAEEALRRAAEAAKESIKAAREALEEVRKAAEKSIRAAEKALRDVKKAAEEAKSAKDEETAKRAAEKALKALKEAIEINAKAAEEALRALREANRINREAAEKALKAAKEALDRANLPDKKLKTAEDLLRKAKKEVEDANRRSEKLIREAEERVRRALKRSKELLKKLEDDARRERAIEEAAKKAIDLARDHARLVKKIAKDLIDLAKEHADLVREIAKRIIEAAKRIAEIVRK

SEQ ID NO: 13951 - protein, 238 aa, Artificial Sequence; identical to SEQ ID NO: 13950
  Synthetic

SEQ ID NO: 13952 - protein, 230 aa, Artificial Sequence
  Synthetic
SDEELLEEIKKILDEVLKKNADAVRSLEKVLDKVLEDNARAVEELKTVLDKVLRDLERRGVGDEEIRELLERLKRELDEALKELAKEYEKLKETLRRVLEELADLYREAKERADRDPDKRKIVEELAKLLDRDVKLNRDLARRVLRLLERDLRVNKELVDRAREVLDEILKRNEDKDVEEVVKEVRDVLRESVDKVRRVIEEVKRVLDRSSEEVERAVEEVKRVLDKVRK

SEQ ID NO: 13953 - protein, 230 aa, Artificial Sequence; identical to SEQ ID NO: 13952
  Synthetic

SEQ ID NO: 13954 - protein, 239 aa, Artificial Sequence
  Synthetic
SDEELLERVERLLRELLDTNRRMLEEVEKELRRLLETNKKTLDDVRRLLKELLDVLETRGVKDEKRLRDIRRRLEEVVRRLDKLHRDIAEDLKRVKERLDRLHERIKRRLEEVVKELRDLKDRGVDERKVLERAAEVLRELLELLRESLEEIERIIRRLLELHKRSTEEAARALEELLRGLEGSDDLRELKKRIEDLLKEDKERLEKIARDIERDLERYARDLKRLEDELREDIERARR

SEQ ID NO: 13955 - protein, 239 aa, Artificial Sequence; identical to SEQ ID NO: 13954
  Synthetic

SEQ ID NO: 13956 - protein, 239 aa, Artificial Sequence; identical to SEQ ID NO: 13954
  Synthetic

SEQ ID NO: 13957 - protein, 239 aa, Artificial Sequence; identical to SEQ ID NO: 13954
  Synthetic

SEQ ID NO: 13958 - protein, 238 aa, Artificial Sequence
  Synthetic
EEDERLTKRVEEIKRENRELLRRLEEEVKELERKSEKIVRDLKEKVDRAKEKLDSGKGSTELLVEELEKLIREILKLSEDHNRTLEEVVRKIEDVLRANLERLKELVDEILKALKERGKGDSEELKRKVEKVARDYERLLRKLREVVKRILDESKRLDEELEERLKEVLKKLEELIKRGGPDKDVLTELKRILDELLKLVEKLIRRNLRLLEELLRLVREILRTSNEILEEILKDARR

SEQ ID NO: 13959 - protein, 238 aa, Artificial Sequence; identical to SEQ ID NO: 13958
  Synthetic

SEQ ID NO: 13960 - protein, 238 aa, Artificial Sequence; identical to SEQ ID NO: 13958
  Synthetic

SEQ ID NO: 13961 - protein, 238 aa, Artificial Sequence; identical to SEQ ID NO: 13958
  Synthetic

SEQ ID NO: 13962 - protein, 245 aa, Artificial Sequence
  Synthetic
TEEEVLRKVEKLIKDLLDVLRDLLRASEEVVREALRVLEELIEENKRVIEELSRALSGGSRESVESALAKNEERLKKILEDADRVLDKWRRLLEELSKKAKAVLDEVRKRLEEIKREVPETEKLRTLLTILEEILRALEKIIRDILRINERLLEKLKRILERLRETNREIDERIRKLVEEARGGSEEKLRRDLTETKKELEKRHEDLRRELEKLLRDYKRELEEIERALEEIEKTLKRRADETRR

SEQ ID NO: 13963 - protein, 245 aa, Artificial Sequence; identical to SEQ ID NO: 13962
  Synthetic

SEQ ID NO: 13964 - protein, 245 aa, Artificial Sequence; identical to SEQ ID NO: 13962
  Synthetic

SEQ ID NO: 13965 - protein, 245 aa, Artificial Sequence; identical to SEQ ID NO: 13962
  Synthetic

SEQ ID NO: 13966 - protein, 234 aa, Artificial Sequence
  Synthetic
SAKETIRKLIEENKDIIRKLAEKLKRLLEESERIAEEALRLIKELLERIERALRRVGSGIDEELLKELEKELARLEEELKEILDRVRDLHRRLAEEIRKILEESKKLNEELEDRLRKDGDVEELLELLERVHATDVRLLRELLKLLKKVHEDVVSLLERLLELLKRVLDRIVEELGLSDKELEKLLEDLEREIRRLAKRLKELSDRLEEKIRKIKRELDDLSARLREKIERTRK

SEQ ID NO: 13967 - protein, 234 aa, Artificial Sequence; identical to SEQ ID NO: 13966
  Synthetic

SEQ ID NO: 13968 - protein, 234 aa, Artificial Sequence; identical to SEQ ID NO: 13966
  Synthetic

SEQ ID NO: 13969 - protein, 234 aa, Artificial Sequence; identical to SEQ ID NO: 13966
  Synthetic

SEQ ID NO: 13970 - protein, 238 aa, Artificial Sequence
  Synthetic
SKEDKARELEKRLRDNLKKLEEVVRELAEVLKRNLEKLRRLAEELLRALKRLLDKLRAGGLPKDELEDLRREVEDVLRRLEDLLRKLKKANDESLTRLEELLRRAEEENRRVLTTLRELLRGNGDDRDLARLVARLVEANNRALEELLRLVAKNVEDNNRVLEELLRLVKELAKRLLGRIRDEDLVRDIRRELKELEERARKILRDDERDLRALEKRIRDIIREDREELERLKERARK

SEQ ID NO: 13971 - protein, 238 aa, Artificial Sequence; identical to SEQ ID NO: 13970
  Synthetic

SEQ ID NO: 13972 - protein, 238 aa, Artificial Sequence; identical to SEQ ID NO: 13970
  Synthetic

SEQ ID NO: 13973 - protein, 238 aa, Artificial Sequence; identical to SEQ ID NO: 13970
  Synthetic

SEQ ID NO: 13974 - protein, 243 aa, Artificial Sequence
  Synthetic
KREDILKKLEDIIRDIIDKLRRILEKVKRLNEDIIREIKRLLDESLKTLEDLLKRIADKSRDRELEDILRRVLEKLRRSLDKLRDTLRKLKEETDTVLERAERTLKELKDRLEKLLRDGEKVSEEDLVEALKALIDELRKVLEDVIRVSKELVERLLRALREHLETNKRLVKELLDALRKTTGDDEEIKRLKEELERRHRRLEEEVERVARELEKAHRDLERDIRRVAEELKKLLKKLRDDRR

SEQ ID NO: 13975 - protein, 243 aa, Artificial Sequence; identical to SEQ ID NO: 13974
  Synthetic

SEQ ID NO: 13976 - protein, 243 aa, Artificial Sequence; identical to SEQ ID NO: 13974
  Synthetic

SEQ ID NO: 13977 - protein, 243 aa, Artificial Sequence; identical to SEQ ID NO: 13974
  Synthetic

SEQ ID NO: 13978 - protein, 236 aa, Artificial Sequence
  Synthetic
SAEETVERLLEEARKRHEEIIKKAKELLDRAREEHERIIREAEKLLEEIKKRVDELVRDGQPAEEVLRDLERVVEEILEVLRRLLDANRRVVDDVLRVLEELLRVNEEVNRRIIETIGLPEEVVEELKEENKRLRDRLDKLVKDLKKTNKEIEDKLRKLAEELKEELERIADRIRKTGTDRKTLLREIEKLLKTLEDILRDLLRLVEKTLKELEEILKDLVDKARENLKRLRERIR

SEQ ID NO: 13979 - protein, 236 aa, Artificial Sequence; identical to SEQ ID NO: 13978
  Synthetic

SEQ ID NO: 13980 - protein, 236 aa, Artificial Sequence; identical to SEQ ID NO: 13978
  Synthetic

SEQ ID NO: 13981 - protein, 236 aa, Artificial Sequence; identical to SEQ ID NO: 13978
  Synthetic

SEQ ID NO: 13982 - protein, 239 aa, Artificial Sequence
  Synthetic
SEKEELKRLLDKLLKELKRLSDELKATIDKILKILKEVSEEVKRTADELLDAIRRGGVDEEVLREIKREIEEIEKKLRKVNKEIEDEIREIKKKLDEVDDKITKEVEKIKEALDKGGVDAKEVIKALKEILKEHADVFEDVLRRLKEIIKRHRDVVKEVLEELRKILEKVAEVLKRQGRSEDELRKVEEDLKRLEDKLKKLLEDYEKKVRELEETLDDLLRKYEETLRRLEKELEEAER

SEQ ID NO: 13983 - protein, 239 aa, Artificial Sequence; identical to SEQ ID NO: 13982
  Synthetic

SEQ ID NO: 13984 - protein, 239 aa, Artificial Sequence; identical to SEQ ID NO: 13982
  Synthetic

SEQ ID NO: 13985 - protein, 239 aa, Artificial Sequence; identical to SEQ ID NO: 13982
  Synthetic

SEQ ID NO: 13986 - protein, 244 aa, Artificial Sequence
  Synthetic
SDAERLVKKIADSLRAYEDLLRKLVERIRDLLRAYEEELRKLLTEIEKTLEDVRDVLRRGNVDERAKEVAKRLVEAVKSLIEIVKRILEKTARVVKKLEDLLRRAAELNRDVVEKILEIIKRGGPEDDFRRIVRRLEELHREVEDAVRKLVEDLKRLHREVVEELADIIRKLDKLLAEVERDIDLGDLLEALRRLVERLKRLIERVLKLNRELVKKLLELLEEALRANRRLVEDILKIADEARK

SEQ ID NO: 13987 - protein, 244 aa, Artificial Sequence; identical to SEQ ID NO: 13986
  Synthetic

SEQ ID NO: 13988 - protein, 244 aa, Artificial Sequence; identical to SEQ ID NO: 13986
  Synthetic

SEQ ID NO: 13989 - protein, 244 aa, Artificial Sequence; identical to SEQ ID NO: 13986
  Synthetic

SEQ ID NO: 13990 - protein, 247 aa, Artificial Sequence
  Synthetic
SATERVLDLARDLIRILLEIHKRALKLIAELVSKLLKIHEDVLKLSEELVEELLEIVKRGLPREDLLRALKELLEKIEDVVRDIERRHRDLLREAEEVVEKLKREHEEVKERIERAVKKLAEDGVDKDKLKELVDVLEEILRLSKTTLEELVKALRDVIRASLEALKENLRILRKIIRELEGLEGVDEDTLRRVLERIREEVERVKEKHRRLLEELKKLLEELRARSADLLEDIKRKVRELEEKTRR

SEQ ID NO: 13991 - protein, 247 aa, Artificial Sequence; identical to SEQ ID NO: 13990
  Synthetic

SEQ ID NO: 13992 - protein, 247 aa, Artificial Sequence; identical to SEQ ID NO: 13990
  Synthetic

SEQ ID NO: 13993 - protein, 247 aa, Artificial Sequence; identical to SEQ ID NO: 13990
  Synthetic

SEQ ID NO: 13994 - protein, 244 aa, Artificial Sequence
  Synthetic
SAEETLRRITEESKRVLEEITKKYEDLERESREVLRKLREDLDRIKRELEDVLTKGGDDKDEVLTVLEKVLDELLKLHRENLRVIKELLRKVLEVDRENLEVLKRLLEKARDLLRRSGRDEKDLKKLEDELRKVKEELEKKHEASKRDIEDLERELDKVTEEVERLLRKLKEELRRAAEGSDEDRERLARLLKALADKLIRVLEEILKINEELNRKIIKFARENLERNRRVNKKVIEVLREAAR

SEQ ID NO: 13995 - protein, 244 aa, Artificial Sequence; identical to SEQ ID NO: 13994
  Synthetic

SEQ ID NO: 13996 - protein, 244 aa, Artificial Sequence; identical to SEQ ID NO: 13994
  Synthetic

SEQ ID NO: 13997 - protein, 244 aa, Artificial Sequence; identical to SEQ ID NO: 13994
  Synthetic

SEQ ID NO: 13998 - protein, 250 aa, Artificial Sequence
  Synthetic
STEEILKRVKEILDELAKELRDIIRESLRTIEELLDELRRILEESERTLEELVKTIKDGVKDSEELLRRLKRLLEDLRRAHEELLKRLKEAVDEHRDRLRKILEELERVLKELRKRIEELRRSGDRISEKDVLRKLEEVLRKALEILERLLKKIRESARELLKIIEEVLDANIKVMEEALKTIKELLKDGPDEVKRRLEEKERRIRTRYEELRRRLRKRVKDYEDKLREIEKKVRRDAERIEEELERAKK

SEQ ID NO: 13999 - protein, 250 aa, Artificial Sequence; identical to SEQ ID NO: 13998
  Synthetic

SEQ ID NO: 14000 - protein, 250 aa, Artificial Sequence; identical to SEQ ID NO: 13998
  Synthetic

SEQ ID NO: 14001 - protein, 250 aa, Artificial Sequence; identical to SEQ ID NO: 13998
  Synthetic

SEQ ID NO: 14002 - protein, 247 aa, Artificial Sequence
  Synthetic
SEKEELLKLIKRVIELLKRVLEEHLRLVEDVIRRLKELLDSNEKIVREVIEDLKRLLDEVRGDKEELDRIKEKLEEVLERYKRRLEEIKRDLERMLEDYKRELKRIEEDLRRVLEEVERIATRGEGPAEALIDKLRKILERALRELDKLSKKLDELLKKVLEELEKSNREIDKLLKDVLRRVEEGGASEDLLRKAKKVITEVREKLKRNLEDVRRVIEDVKRKSARILEEARRLIEEVERELEKIRK

SEQ ID NO: 14003 - protein, 247 aa, Artificial Sequence; identical to SEQ ID NO: 14002
  Synthetic

SEQ ID NO: 14004 - protein, 247 aa, Artificial Sequence; identical to SEQ ID NO: 14002
  Synthetic

SEQ ID NO: 14005 - protein, 247 aa, Artificial Sequence; identical to SEQ ID NO: 14002
  Synthetic

SEQ ID NO: 14006 - protein, 236 aa, Artificial Sequence
  Synthetic
SRAERIKRALEEHIRKLKEITDEVRKTNEELLELTRRILEEAKKANEELVKKIREAGDKSKELEEEIRKLIEESERIVEELEERSKELLKRSREEVEEWRRRSEELLRRLEAILRGVKDEKELVERAVKILRDDSRIAKEILRRNLRLIEENLERLKEIIERNLDLLRRLLELLKRAGVDEEALKELEEKLDRYRRKLEDLLRKYAKKLEDYKRKVKKLEEENEELLKRIEKEMEK

SEQ ID NO: 14007 - protein, 236 aa, Artificial Sequence; identical to SEQ ID NO: 14006
  Synthetic

SEQ ID NO: 14008 - protein, 236 aa, Artificial Sequence; identical to SEQ ID NO: 14006
  Synthetic

SEQ ID NO: 14009 - protein, 236 aa, Artificial Sequence; identical to SEQ ID NO: 14006
  Synthetic

SEQ ID NO: 14010 - protein, 238 aa, Artificial Sequence
  Synthetic
SEAEKIREALETNLRLLEELIKRLKEILDTHNELLRRVIETLERLLKELLELLEEGGLDEEVLREVKRLVDELRKEARRVLDEHEKLVRKIKKEAEDVARESEEIIKEVEDKLKGLDREELLERVRRVLKKSDDLIAELVRRALKILEELTRLLAELLKKVVEILRRIVELVERVLTKKGAPKEDLERLRRKVEELEDRLRRLLEKLARDSAELMRELERILDRYARESEELDRRLAE

SEQ ID NO: 14011 - protein, 238 aa, Artificial Sequence; identical to SEQ ID NO: 14010
  Synthetic

SEQ ID NO: 14012 - protein, 238 aa, Artificial Sequence; identical to SEQ ID NO: 14010
  Synthetic

SEQ ID NO: 14013 - protein, 238 aa, Artificial Sequence; identical to SEQ ID NO: 14010
  Synthetic

SEQ ID NO: 14014 - protein, 248 aa, Artificial Sequence
  Synthetic
SAEEELEKLVRKVEEDLKRLEEESERIKKEIKDTLRAIRKRSEDLKRKVKELLRRLEEEGRRVSLEEAIKIIKEILDELAKVNEDIIRIIKELLKRLVDTNRRVIETIDRILKKLVDDLRRGNLPEDKLREVERELRELKKELEEIVRESEKMLKELEDKLREIVRESRELLEKLRRDLKRIKDGNLSADEALEMLKRLLDKALKVHEDVLRKLVELVDEVLKVHEESLRKLLTLAAKVLEVLRKITK

SEQ ID NO: 14015 - protein, 248 aa, Artificial Sequence; identical to SEQ ID NO: 14014
  Synthetic

SEQ ID NO: 14016 - protein, 248 aa, Artificial Sequence; identical to SEQ ID NO: 14014
  Synthetic

SEQ ID NO: 14017 - protein, 248 aa, Artificial Sequence; identical to SEQ ID NO: 14014
  Synthetic

SEQ ID NO: 14018 - protein, 244 aa, Artificial Sequence
  Synthetic
DDERRKLEDLERMVEELKRKSDKLLKEIREEVERLERETRKLLEELKAKVDELREDLRRNPGDRVLEKLVKLLEDILDKVRKLLKENLDLLKRLLDIIEKLLRDNVRLLEELLRIVRELGKSGDEEKLTRKLEKALKEVRDAARETRERLKEAKKEVKTVADRNRARLEELEEEVKRVLDEIRKEGGPSEDLEKAERLVKDILRLNEEHTAELEDVVRDLLRALEKHTRDLEKLVKDALDKVKT

SEQ ID NO: 14019 - protein, 244 aa, Artificial Sequence; identical to SEQ ID NO: 14018
  Synthetic

SEQ ID NO: 14020 - protein, 244 aa, Artificial Sequence; identical to SEQ ID NO: 14018
  Synthetic

SEQ ID NO: 14021 - protein, 244 aa, Artificial Sequence; identical to SEQ ID NO: 14018
  Synthetic

SEQ ID NO: 14022 - protein, 244 aa, Artificial Sequence
  Synthetic
SKIDEALKKLAKILEDAIKLNKELNDTTAEILKEIIKLNAEVLEKIRRILKELVDLILKGLKDDEEAKKELKKVLEEVARRLEEIKKETDRIVKEVEELNERNDREVKRAAEEVRRLLEEIKRSDRDEKELIKALKEIVDRIREAHRRSVEELSEVVKRILDALKDTLRKLEDVVRKLLELARRIAGDTEELRRVVEKVRKELEDDKERYKRLEEEVRRLLEEMKRRSEDLERKVEEILRRLTE

SEQ ID NO: 14023 - protein, 244 aa, Artificial Sequence; identical to SEQ ID NO: 14022
  Synthetic

SEQ ID NO: 14024 - protein, 244 aa, Artificial Sequence; identical to SEQ ID NO: 14022
  Synthetic

SEQ ID NO: 14025 - protein, 244 aa, Artificial Sequence; identical to SEQ ID NO: 14022
  Synthetic

SEQ ID NO: 14026 - protein, 239 aa, Artificial Sequence
  Synthetic
DEEEKIREDLERTLREYERELRRAKEELKETLKRYEEELREVKEDLDRTLEEVDDLLRRGSLSDREAIRILRELLKKLEEIIRRSKEVLDKLIKDLEDISRRSIEVLEELVKKVRKDGLPEEVLRRIKDLIRRLRERNKEILDRIRKLIEELVERNKRALDRLRKLIKELEERVRRTDDKETLARDLKEALKTLIKLIREILEDNLRVLRRIIELIETLLEDNRRVLEEIIKLIEEATT

SEQ ID NO: 14027 - protein, 239 aa, Artificial Sequence; identical to SEQ ID NO: 14026
  Synthetic

SEQ ID NO: 14028 - protein, 239 aa, Artificial Sequence; identical to SEQ ID NO: 14026
  Synthetic

SEQ ID NO: 14029 - protein, 239 aa, Artificial Sequence; identical to SEQ ID NO: 14026
  Synthetic

SEQ ID NO: 14030 - protein, 244 aa, Artificial Sequence
  Synthetic
DELEKVERLLEEIEKIIEDLIRRVEELVRRILEFNKTTLKRNEELVRELEKLVKETTGGTEELKKIVEKLEKLHREVKKKSDDLVKRAEELLKEVKERLKEIVKTIREELRKVKESGGDREELLKLLAEILDKLLKLLKRIIEELLRILKELIKASKESLDDLKRINEELLRDIEDLIRKGIKESKEVVRKLEEDLRRVRERSKKLVREHEKFLEDLEETIKEEKRRVDEELKRIKEEIKETRR

SEQ ID NO: 14031 - protein, 244 aa, Artificial Sequence; identical to SEQ ID NO: 14030
  Synthetic

SEQ ID NO: 14032 - protein, 244 aa, Artificial Sequence; identical to SEQ ID NO: 14030
  Synthetic

SEQ ID NO: 14033 - protein, 244 aa, Artificial Sequence; identical to SEQ ID NO: 14030
  Synthetic

SEQ ID NO: 14034 - protein, 242 aa, Artificial Sequence
  Synthetic
SEKERLMRLLDKLKDLNRRLVERIKELLDKALELHKKLVKELRELLERLKELVERGGVPEELLTRIDELIKKLEDEARKISKEVKRLIDELKKRLEDIHREVDRLIRELKETLKGVTDKDELLRRVAEVLERIARLSEELIREVKEVLEKIVELSRELLKRVLDVLRRIAELLEDALRKGNVSEETVRRLREALKKLEDDLRKIERDAEREYKKLKDELEELTERYRREIRKLKEELKADRK

SEQ ID NO: 14035 - protein, 242 aa, Artificial Sequence; identical to SEQ ID NO: 14034
  Synthetic

SEQ ID NO: 14036 - protein, 242 aa, Artificial Sequence; identical to SEQ ID NO: 14034
  Synthetic

SEQ ID NO: 14037 - protein, 242 aa, Artificial Sequence; identical to SEQ ID NO: 14034
  Synthetic

SEQ ID NO: 14038 - protein, 247 aa, Artificial Sequence
  Synthetic
SEAEDLEELIKELAELLKDVIRKLEKINRRLVKILEDIIRRLKEISKEAEEELRKGTVEDKDILRDLERRLREILEESDRLLEELKRRLEEILRKSKELLRRLEEVLREILKRAEEVKRSNLPKEELIKEIVKLLEELLRVIEKILEDNIRLLEELVEVIKEILEKHLRLLEELVRVIERILREVGKDKDEAERRRRELKDKLDRLREEHEEVKRRLEEELTRLRETHKKIEKELREALKRVRDRST

SEQ ID NO: 14039 - protein, 247 aa, Artificial Sequence; identical to SEQ ID NO: 14038
  Synthetic

SEQ ID NO: 14040 - protein, 247 aa, Artificial Sequence; identical to SEQ ID NO: 14038
  Synthetic

SEQ ID NO: 14041 - protein, 247 aa, Artificial Sequence; identical to SEQ ID NO: 14038
  Synthetic

SEQ ID NO: 14042 - protein, 240 aa, Artificial Sequence
  Synthetic
SDKEEIKRRVEKTARDLETEHDKIKKRLEDTVRDIKRELDELLEKYERVLRKIEKTLREGDGDATDLVDKLLETVKRLNEEVLRTVKKIADELRRLVEEVLRVLRESNETLARLLEEGNVGDEVRERLEEVLRRTEEIIKTLEEIVKRLLDELRRLVEELRRISKKLKDELDKIKEKGKDEKRLIEEVVRLLRENLDVVRRILEALAKLIKELLEALEEVLRRNKELIRELLRVLDEALK

SEQ ID NO: 14043 - protein, 240 aa, Artificial Sequence; identical to SEQ ID NO: 14042
  Synthetic

SEQ ID NO: 14044 - protein, 240 aa, Artificial Sequence; identical to SEQ ID NO: 14042
  Synthetic

SEQ ID NO: 14045 - protein, 240 aa, Artificial Sequence; identical to SEQ ID NO: 14042
  Synthetic

SEQ ID NO: 14046 - protein, 248 aa, Artificial Sequence
  Synthetic
DEEERVKKLLTDLRRLLRKLHEESKKLLDELRKKLRELRRRSEEKLREVERRLREAEKKLPGTRVLKLVADVVKKVLDAIRDLNRKLEEIIDEALKLLEELDDILRRVVEEALRLLKEIKDTKGDREEVKKRVEDILKRLEELVKEYEDRVREIKKRLRRALEELRDEYRKIREDIERVLDELRKGGVPEELLRVLEELVRTLKKLLDENLKMVERLIRELEKVLDDHERKVRRLIEELLEVLDRDAK

SEQ ID NO: 14047 - protein, 248 aa, Artificial Sequence; identical to SEQ ID NO: 14046
  Synthetic

SEQ ID NO: 14048 - protein, 248 aa, Artificial Sequence; identical to SEQ ID NO: 14046
  Synthetic

SEQ ID NO: 14049 - protein, 248 aa, Artificial Sequence; identical to SEQ ID NO: 14046
  Synthetic

SEQ ID NO: 14050 - protein, 248 aa, Artificial Sequence
  Synthetic
DEDRIIEEIARLLEELLRELLELIKKLIETNRRLNEEHERAVRELARLLEELLDRLVKKGISDEKLKRIRERLKRALDDLERLHREINKRLEDLVRELEKLVREILKELKDALEELRRASARAGGEEVLRRLEEIVKKLLDLVRRILERLKEIHKDNVRLLRELNERLTRIVEDLVRLIREILREAGVDEKIAEEIERELEELRRMIKRLHEDLERKLKESEDELREIEARLEEKIRRLEEKLERKRR

SEQ ID NO: 14051 - protein, 248 aa, Artificial Sequence; identical to SEQ ID NO: 14050
  Synthetic

SEQ ID NO: 14052 - protein, 248 aa, Artificial Sequence; identical to SEQ ID NO: 14050
  Synthetic

SEQ ID NO: 14053 - protein, 248 aa, Artificial Sequence; identical to SEQ ID NO: 14050
  Synthetic

SEQ ID NO: 14054 - protein, 251 aa, Artificial Sequence
  Synthetic
DEEEKIRTTLDLLRKLLKVLREILEELIRSNKELNERLLRLVEDSDRLLEELLKKLADDGGVDEEALRRIKKRLEDLIRTNREIEERIDRESERLAEELRRILRELEKELRRLIEDLKEVLKRGLPREELLRRLKKVVEDVLRILEEVLRVVDELDKENVRLLREWLERNKEIVEEVIRILEDLIRKGGSESEEKVRDTEKKLRDLREKHAEIAKELERLLRENRRRLEELAREAKKVLDELRKRLEDERR

SEQ ID NO: 14055 - protein, 251 aa, Artificial Sequence; identical to SEQ ID NO: 14054
  Synthetic

SEQ ID NO: 14056 - protein, 251 aa, Artificial Sequence; identical to SEQ ID NO: 14054
  Synthetic

SEQ ID NO: 14057 - protein, 251 aa, Artificial Sequence; identical to SEQ ID NO: 14054
  Synthetic

SEQ ID NO: 14058 - protein, 242 aa, Artificial Sequence
  Synthetic
SEKEKLLKESEEEVRRLRRTLEELLRKYREVLERLRKELREIEERVRDVVRRLKEVLDRKGLDIDTIIKEVEDLLKTVLDRLRELLDKIRRLTKEAIEVVREIIERIVRHAERVKDELRKEGGDKEKLDRVDRLIKENTRHLKEILDRIEDLVRRSEKKLRDIIREVRRLIEELRKKAEEIKKGPDERLVKTLIEDVEAVIKRILELITRVAEDNERVLERIIRELTDNLERHLKIVREIVK

SEQ ID NO: 14059 - protein, 242 aa, Artificial Sequence; identical to SEQ ID NO: 14058
  Synthetic

SEQ ID NO: 14060 - protein, 242 aa, Artificial Sequence; identical to SEQ ID NO: 14058
  Synthetic

SEQ ID NO: 14061 - protein, 242 aa, Artificial Sequence; identical to SEQ ID NO: 14058
  Synthetic

SEQ ID NO: 14062 - protein, 244 aa, Artificial Sequence
  Synthetic
SELERAEELIKKLLKLHEDVLRRLTEVDDELLEIHDRVLKRLKEVDDELLKLIRDMLRRGNISEDLVREVEERLKTLEKRSRDKKAENEKALRELKKKSEKLRRESRKLLEELRKKVEELRGVDKKDVEKLIKEIVEVHRAMLEKWLRLNEEIAKVHEDSVRDWLKANEEIARTIEEILRRVLRGDEEAKDIREKLERLLRKSEELVRKSLKELKELLDKSKKLLEDSKRRLEEILKEIKDDSR

SEQ ID NO: 14063 - protein, 244 aa, Artificial Sequence; identical to SEQ ID NO: 14062
  Synthetic

SEQ ID NO: 14064 - protein, 244 aa, Artificial Sequence; identical to SEQ ID NO: 14062
  Synthetic

SEQ ID NO: 14065 - protein, 244 aa, Artificial Sequence; identical to SEQ ID NO: 14062
  Synthetic

SEQ ID NO: 14066 - protein, 244 aa, Artificial Sequence
  Synthetic
SLKEIVKEIIDRASELLKRLLERSEDSLRTASELLRKILEDSRRSLRTIARLLEELLRTSGPEEELERAARRVKEELERLHKEIRDVIEEIKKTLAKLNEDLREAIERVKRELERLLKELEDSGVPEELLELVKRVVELMAELLDRLLALNEKILRDIMSILDEILDLNREILRLVKEIIELIRRDGPDREIEKEIRRILEELKAKHDEIEKKIRELEREIKRAHEELEDRIRKIERDLDRRTK

SEQ ID NO: 14067 - protein, 244 aa, Artificial Sequence; identical to SEQ ID NO: 14066
  Synthetic

SEQ ID NO: 14068 - protein, 244 aa, Artificial Sequence; identical to SEQ ID NO: 14066
  Synthetic

SEQ ID NO: 14069 - protein, 244 aa, Artificial Sequence; identical to SEQ ID NO: 14066
  Synthetic

SEQ ID NO: 14070 - protein, 242 aa, Artificial Sequence
  Synthetic
SSEELLKRIVDEDERVLEEWARVLEEIKDLSKAVVDLLDKVLKEIEAIVDEVTRRLERDGTDDKKKIRDLVEEIKDIIRRAREKLRRIVKENEEILEEAKRRLDKIAEDNRRTLEKVRKELEETKSEREVKRILERVLREAEDSHRRAVELLEELLDRSRRTIEEAIRLIKELLDRILELLKRLGLPKDLLETIKKRVEEIRRTLEKIKRDYDKAIEEIRAKLERKLEEYKEVIDDLRRKTK

SEQ ID NO: 14071 - protein, 242 aa, Artificial Sequence; identical to SEQ ID NO: 14070
  Synthetic

SEQ ID NO: 14072 - protein, 242 aa, Artificial Sequence; identical to SEQ ID NO: 14070
  Synthetic

SEQ ID NO: 14073 - protein, 242 aa, Artificial Sequence; identical to SEQ ID NO: 14070
  Synthetic

SEQ ID NO: 14074 - protein, 238 aa, Artificial Sequence; identical to SEQ ID NO: 13234
  Synthetic

SEQ ID NO: 14075 - protein, 238 aa, Artificial Sequence; identical to SEQ ID NO: 13234
  Synthetic

SEQ ID NO: 14076 - protein, 238 aa, Artificial Sequence; identical to SEQ ID NO: 13234
  Synthetic

SEQ ID NO: 14077 - protein, 238 aa, Artificial Sequence; identical to SEQ ID NO: 13234
  Synthetic

SEQ ID NO: 14078 - protein, 231 aa, Artificial Sequence
  Synthetic
DKAEVLREALKLLKDLLEELIKIHEESLKRILDLIDTLVKVHEDALRALKELLERSGLDERELRKVERMATESLRTIAKLKEELRDLARRSLEKLREDLKRVDDTLRKVEEKVRRTGPSEELIEELIRTIEKLLKEIVRINEEVLKAVRELLKTLLKLSEDVVRRIEEILRKGGVPEEIDRELKRVVEELRRLHEEIKERLDDVARRSEEELRRIIKKLKEVVKEIRKKLK

SEQ ID NO: 14079 - protein, 231 aa, Artificial Sequence; identical to SEQ ID NO: 14078
  Synthetic

SEQ ID NO: 14080 - protein, 231 aa, Artificial Sequence; identical to SEQ ID NO: 14078
  Synthetic

SEQ ID NO: 14081 - protein, 231 aa, Artificial Sequence; identical to SEQ ID NO: 14078
  Synthetic

SEQ ID NO: 14082 - protein, 236 aa, Artificial Sequence
  Synthetic
STREKAKKVLDTLRADNEDMKRVVEKILRALKRTNERAEKLAREITEEIKRILKEVGVSEEALKEIEDTLKRVLEEIKRLLDESKKLLEDVEREIREILKTSEELLERIEREIETVGSDEKTLAEILKRLLELNEEMNRRLLKILRDLLRLNEEVIRRLLAVLERLLDALKEALDRGDVPEDLLRKLEEELRRIKEKLRKALEELEREHRELEKELDKLHDESRKEHERIEEELRR

SEQ ID NO: 14083 - protein, 236 aa, Artificial Sequence; identical to SEQ ID NO: 14082
  Synthetic

SEQ ID NO: 14084 - protein, 236 aa, Artificial Sequence; identical to SEQ ID NO: 14082
  Synthetic

SEQ ID NO: 14085 - protein, 236 aa, Artificial Sequence; identical to SEQ ID NO: 14082
  Synthetic

SEQ ID NO: 14086 - protein, 247 aa, Artificial Sequence
  Synthetic
SKAEKLLKDLREALEKVKRRYEELERRLDEVLKEHEEIVKRLLEELEKVLKRIEEGGLPEEELEKLKKLAEKVKELLRELLRLSKELVDRVRELLKRDLDLVRRLVEIALKVLREAREQPNDEKRVEKIKRDLEKKARRVREENERIKRDLKRTADESRKRLEKLLEDLKRELDRLREDLDRGRKDIDERVEELIERLIRIIERLLREVIKSHEKLVRTIERLIEESIRVNEELLEVIERLLDRARK

SEQ ID NO: 14087 - protein, 247 aa, Artificial Sequence; identical to SEQ ID NO: 14086
  Synthetic

SEQ ID NO: 14088 - protein, 247 aa, Artificial Sequence; identical to SEQ ID NO: 14086
  Synthetic

SEQ ID NO: 14089 - protein, 247 aa, Artificial Sequence; identical to SEQ ID NO: 14086
  Synthetic

SEQ ID NO: 14090 - protein, 243 aa, Artificial Sequence
  Synthetic
DLERVVEDIVDKAKRLLDKNLEVLKRIVDEVLRLLERLLRESRKVVKRVKEIIEELVRDEKELRRVKRALEEVLRRHEEIAKELKERLRKVAKEAEEKHKKLVEDLKRVVDEVRKKLSGPLDREKVLEVLDELVTIIAKLLDENIKVLEEVIRVIAELLERLLDSHRRLIDIIAKLLEGLRPGDEDLLTELEKKLRKLKRDSEKVVDDLKKELERIKREVKRLIEENARTLADIKRAVDEARK

SEQ ID NO: 14091 - protein, 243 aa, Artificial Sequence; identical to SEQ ID NO: 14090
  Synthetic

SEQ ID NO: 14092 - protein, 243 aa, Artificial Sequence; identical to SEQ ID NO: 14090
  Synthetic

SEQ ID NO: 14093 - protein, 243 aa, Artificial Sequence; identical to SEQ ID NO: 14090
  Synthetic

SEQ ID NO: 14094 - protein, 239 aa, Artificial Sequence
  Synthetic
SERELIERWLELHKEILRLIRELVERLLKLHREILDTIKKLIRELLELLEDIARKLGLDKEAKDELREIAKRVEDKLEKLERESRKVEEDLKRKLKELTDESDTVEKRVRDVVRRGTQSREEIAEELLRLDRKLLKAVEELLKEILDLNKKLLDDVRAILEETRRVLEKLLDRVRRGERTDDERRTLTELLKRMEDILEKVERTLKKLLDDSARMAEEVKKTLKELLERSEKVAEDVRK

SEQ ID NO: 14095 - protein, 239 aa, Artificial Sequence; identical to SEQ ID NO: 14094
  Synthetic

SEQ ID NO: 14096 - protein, 239 aa, Artificial Sequence; identical to SEQ ID NO: 14094
  Synthetic

SEQ ID NO: 14097 - protein, 239 aa, Artificial Sequence; identical to SEQ ID NO: 14094
  Synthetic

SEQ ID NO: 14098 - protein, 241 aa, Artificial Sequence
  Synthetic
KKEEDLRREVEEVKEEIRELIERSRESVRRILKEIKDLIRKSKESIDKILEDLKRKNLDETLIRAVEKLLRENLELLKKLLETVKELLERNEELLKRLVEEAERILEELLEVARRSGDEKALERVVREVEKELKRLDDELKKALKDSEEELKRLEDELRRAKEENEKTLKKLRDDLRREGRDEEVLRVVEELLKLLKEHLEENVRILRRILELLRRHHDTNRKIVKRILELLRRVLESIRK

SEQ ID NO: 14099 - protein, 241 aa, Artificial Sequence; identical to SEQ ID NO: 14098
  Synthetic

SEQ ID NO: 14100 - protein, 241 aa, Artificial Sequence; identical to SEQ ID NO: 14098
  Synthetic

SEQ ID NO: 14101 - protein, 241 aa, Artificial Sequence; identical to SEQ ID NO: 14098
  Synthetic

SEQ ID NO: 14102 - protein, 241 aa, Artificial Sequence
  Synthetic
SKKELLEEVVRRAIELLKRHLEKLKRILEEIVRLLEEHLEKVERVLEAILSLLDDLLRRGGDERAIRTLEDVKRRLREILERLADENAKAIKRLADLLDKLEKRNKEAIERLEEILEELKRVRRDEELLRVLETLLKIIEDILRENTKVLEDLLRLVEEILEANLRVVEELLRLAREILTEIVGDEDKLKEIEDELRRLLEELRRLDKAIKDRLRELKKDLDEANRRIKETLKKLLREVEK

SEQ ID NO: 14103 - protein, 241 aa, Artificial Sequence; identical to SEQ ID NO: 14102
  Synthetic

SEQ ID NO: 14104 - protein, 241 aa, Artificial Sequence; identical to SEQ ID NO: 14102
  Synthetic

SEQ ID NO: 14105 - protein, 241 aa, Artificial Sequence; identical to SEQ ID NO: 14102
  Synthetic

SEQ ID NO: 14106 - protein, 238 aa, Artificial Sequence
  Synthetic
SDLEELEALIRRLLKINEDLIRIIEDLIRKSLTLLKRIVDLIRELIREIEEIIRRTGIPKELVDEAREKIKRILDEVERLLRELAKAHREILEELRANLERVRRELKKILDRLRDLKRGSGSEEEIRKLIEELLKVHKESLDSIRRLIEKLLRVHETALRRLAELIRRLLEVLKEVLDKGPVSEEIRKRVRDLEEKVKKLLRDLEEESRRVAEKVEEDLKRVEEESRRTAREVEEKER

SEQ ID NO: 14107 - protein, 238 aa, Artificial Sequence; identical to SEQ ID NO: 14106
  Synthetic

SEQ ID NO: 14108 - protein, 238 aa, Artificial Sequence; identical to SEQ ID NO: 14106
  Synthetic

SEQ ID NO: 14109 - protein, 238 aa, Artificial Sequence; identical to SEQ ID NO: 14106
  Synthetic

SEQ ID NO: 14110 - protein, 234 aa, Artificial Sequence
  Synthetic
SERDVLRELLERIKKLLETLIRIVEELVRRSEETIKRLAELNRRLIEEIRRIVEEVKKGVSEEALRDVERLLKELADETEKILREVKKRLDDNLKRLEEIVRDVERLLKELKEEVDRGDKSKEELVREILKVAEEILRKIEELVKHHLDLNRDILRLFTESAEKLEEILREVLRKLGLDEEVKKRVEELRREYRETLKRLRDESEKIAEELKRLLDELRRRLEELARELRERTK

SEQ ID NO: 14111 - protein, 234 aa, Artificial Sequence; identical to SEQ ID NO: 14110
  Synthetic

SEQ ID NO: 14112 - protein, 234 aa, Artificial Sequence; identical to SEQ ID NO: 14110
  Synthetic

SEQ ID NO: 14113 - protein, 234 aa, Artificial Sequence; identical to SEQ ID NO: 14110
  Synthetic

SEQ ID NO: 14114 - protein, 241 aa, Artificial Sequence
  Synthetic
SKEELVKEIDELNKRVNDLLEELLRKSEKLHKEILELLERLLREIISLLRRILEIVERRLEDETLKRVLEKLEETLRRLKKKVDEELKRLEDENRRLKEEMDRLLRKSAEELERLREKVVRDGGSGDEVLARLLELHTEDLKHAREVLDEVLRLNKKALDLIRAILTEVLKLIKELLKLIEAGADEDELRRLLEDIERKIEALLRELKKESEEIRKRIRELLEDNRDKSRKIKKAIEELKK

SEQ ID NO: 14115 - protein, 241 aa, Artificial Sequence; identical to SEQ ID NO: 14114
  Synthetic

SEQ ID NO: 14116 - protein, 241 aa, Artificial Sequence; identical to SEQ ID NO: 14114
  Synthetic

SEQ ID NO: 14117 - protein, 241 aa, Artificial Sequence; identical to SEQ ID NO: 14114
  Synthetic

SEQ ID NO: 14118 - protein, 246 aa, Artificial Sequence
  Synthetic
KEIEETLKELEDLNREMVETNRRVLEETRRLNKETVDRVKATLDELAKMLKKLVDDVRKGPTSEELKRLLAELEELLARVVRRVEELLKKSTDLLERAVKDSADALRRSHEVLKEVASRVKRAKDEGLPREEVLRLLRELLERHAKVLKDIVRVSEKLLREHLKVLREIVEVLEELLERILKVILDTTGGDKAVEELEKALEEIKRRLKEVIDRYEDELRKLRKEYKEKIDKYERKLEEIERRERT

SEQ ID NO: 14119 - protein, 246 aa, Artificial Sequence; identical to SEQ ID NO: 14118
  Synthetic

SEQ ID NO: 14120 - protein, 246 aa, Artificial Sequence; identical to SEQ ID NO: 14118
  Synthetic

SEQ ID NO: 14121 - protein, 246 aa, Artificial Sequence; identical to SEQ ID NO: 14118
  Synthetic

SEQ ID NO: 14122 - protein, 231 aa, Artificial Sequence
  Synthetic
SKEEEVEKVLRKWEEILRRLIEENKRANDKIRREYEELVKEIRRVLEEIKEVAERLGVSEEVKRILEKLIKLLEDILEYEKENVERLIELNERILRELKKSVEELKALVTRVRRDGLPESEVRKLVEDVLRKNEELLKEAKKAWRDSIENLKRVLEEVAKLVKTVLREIEEKIDDEDVVRALIEVIERLLRVAEEVIRRILKVNTELMRVDERSIRESLKAISEVLKVLDT

SEQ ID NO: 14123 - protein, 231 aa, Artificial Sequence; identical to SEQ ID NO: 14122
  Synthetic

SEQ ID NO: 14124 - protein, 231 aa, Artificial Sequence; identical to SEQ ID NO: 14122
  Synthetic

SEQ ID NO: 14125 - protein, 231 aa, Artificial Sequence; identical to SEQ ID NO: 14122
  Synthetic

SEQ ID NO: 14126 - protein, 245 aa, Artificial Sequence
  Synthetic
DEDELIRKLLEDLKDIVRKILELIERDLRDIERVVRRIVKVIRDDLKKIKEVVDDIARGVPRTEELERVIKRIEELLRTSEEELDRILKEIEELLRESRRRLEEVVSAVEELLRRVEEIVDKGRESKEDVIKLLREVVDDILRLVEEVVRTNLEIIKRILELIERVIRLNLSIIRDILRLLEGTVDSELADRIRKLIEDLERHTAKVLEDVKRAITELRKNSKDILEEVRKLIDELRKRIKEVED

SEQ ID NO: 14127 - protein, 245 aa, Artificial Sequence; identical to SEQ ID NO: 14126
  Synthetic

SEQ ID NO: 14128 - protein, 245 aa, Artificial Sequence; identical to SEQ ID NO: 14126
  Synthetic

SEQ ID NO: 14129 - protein, 245 aa, Artificial Sequence; identical to SEQ ID NO: 14126
  Synthetic

SEQ ID NO: 14130 - protein, 247 aa, Artificial Sequence
  Synthetic
RDRDVLRKVKAEIEELVARIEKVSRDALSEVKRLLDENRKIAEDVLRLIESLLRKIRDTRGDDEVVKETEEVLRDNHRLLEELIRRLIKVLEEWLRRHKKLLDEIRELLKEILRLVKESGVSEDLLRRLKRVIEELDKKLKESEEKLRRVVEKAKEDLKAVLEEHRKVLEDLKRALEEVREKLRERGSEEVVEELLRMLKRVAEEMKRVHDDLSRAVEKVVRDVVRVDKELLDELARILRRLEEVIT

SEQ ID NO: 14131 - protein, 247 aa, Artificial Sequence; identical to SEQ ID NO: 14130
  Synthetic

SEQ ID NO: 14132 - protein, 247 aa, Artificial Sequence; identical to SEQ ID NO: 14130
  Synthetic

SEQ ID NO: 14133 - protein, 247 aa, Artificial Sequence; identical to SEQ ID NO: 14130
  Synthetic

SEQ ID NO: 14134 - protein, 231 aa, Artificial Sequence
  Synthetic
SKDEELARLLEELVERWRKIVEDLERDHRRLVKEIRELVERIRKKLEELVDRIRKNGIDERIVRLIEEIAKIIEEVLKEIVKLVERAVRENVRVLRESVRLVAELVETLARLLRGSDERVTEAIKKVLDTSEDLIRRVIKVNEDILREIAKLVEEVLREAERILTEIKKEGDREEIRRILEELKRIVDDVLRIIARILKLLRDLTRRLAEVAKAVHKLLEELLRKLKEDTR

SEQ ID NO: 14135 - protein, 231 aa, Artificial Sequence; identical to SEQ ID NO: 14134
  Synthetic

SEQ ID NO: 14136 - protein, 231 aa, Artificial Sequence; identical to SEQ ID NO: 14134
  Synthetic

SEQ ID NO: 14137 - protein, 231 aa, Artificial Sequence; identical to SEQ ID NO: 14134
  Synthetic

SEQ ID NO: 14138 - protein, 235 aa, Artificial Sequence
  Synthetic
SAAETVKRLAEESSERIRKIVEDDKRVADDSSRKIKELIEEIKRRVKELLDRIKGLGSTEDLEKLLDELLKEVKRLLEELLDAHAKWSDDSRRLLEAVLRTHKELIDRLIKLLRDGGKPEEAVRRLEKVLRESLRRVKEVIKELIDLNKETLDRLKKIVEDLERVLREVLTELRRGSDSKEAVIRLIEELVKLLEDVLRRLLEVNETLVELNKRVWDRLVRINEELAEVALRVAT

SEQ ID NO: 14139 - protein, 235 aa, Artificial Sequence; identical to SEQ ID NO: 14138
  Synthetic

SEQ ID NO: 14140 - protein, 235 aa, Artificial Sequence; identical to SEQ ID NO: 14138
  Synthetic

SEQ ID NO: 14141 - protein, 235 aa, Artificial Sequence; identical to SEQ ID NO: 14138
  Synthetic

SEQ ID NO: 14142 - protein, 235 aa, Artificial Sequence
  Synthetic
SALETVKKLLEDSSEKIERIVEEDERVAKESSDRIRRLVEEDKRVADEILDLIEKIGDTDTLLKLVEEWSRTSKKLLDDVLKLHKDWSDDSRRLLEEILRVHEELIRRVKEILDREGKPEEVVRELEKVLKESLDTLEEIIRRLDEANAATVKRVADVIRELEDINRKVLEEIKRGSDDAEAVIKVIEKLIRANKRVWDALLKINEDLVRVNKTVWKELLRVNEKLARDLERVVK

SEQ ID NO: 14143 - protein, 235 aa, Artificial Sequence; identical to SEQ ID NO: 14142
  Synthetic

SEQ ID NO: 14144 - protein, 235 aa, Artificial Sequence; identical to SEQ ID NO: 14142
  Synthetic

SEQ ID NO: 14145 - protein, 235 aa, Artificial Sequence; identical to SEQ ID NO: 14142
  Synthetic

SEQ ID NO: 14146 - protein, 242 aa, Artificial Sequence
  Synthetic
DEIETVLKRLAELIKESLDLLRETLDELRKIIEESKKSLEDVLRRLKELIDRLRRLAKEGGSEELLRLLIEVIERLLKVVEDLLRESNRVVERLIRVNREALRLSNRVVADLLKVLKDAGPDSEELRKLAEDVLRENAELSRESVKIAEKMLEENRDLTRRLKELAKKVLEEIRDLVRGVRDADELLRRVEEILKRLLELIRRIIEEHRKILERLLETHEDLIRKHEEILRRLLKAADEERQ

SEQ ID NO: 14147 - protein, 242 aa, Artificial Sequence; identical to SEQ ID NO: 14146
  Synthetic

SEQ ID NO: 14148 - protein, 242 aa, Artificial Sequence; identical to SEQ ID NO: 14146
  Synthetic

SEQ ID NO: 14149 - protein, 242 aa, Artificial Sequence; identical to SEQ ID NO: 14146
  Synthetic

SEQ ID NO: 14150 - protein, 233 aa, Artificial Sequence
  Synthetic
SKEEKLKDDVRAVLEDLDRVLKELEKLSEDNLRELKRVLDRITDLHRRILDELRKGIGSEELLRRVEKVLKDNLDLLRKLVEEHKESSERDLKRVEDLVREIKEVLRKLLELEDRGTDIRKIEEEIERLLRKIRKAVEESKDLNRRNSERIEEVARRSEELARRLLKEIRERGDSKAAEDILRVLEKLVKVSREAIKLILELSEHHVRVSTRIARLLLDVARKLAEVIKEAER

SEQ ID NO: 14151 - protein, 233 aa, Artificial Sequence; identical to SEQ ID NO: 14150
  Synthetic

SEQ ID NO: 14152 - protein, 233 aa, Artificial Sequence; identical to SEQ ID NO: 14150
  Synthetic

SEQ ID NO: 14153 - protein, 233 aa, Artificial Sequence; identical to SEQ ID NO: 14150
  Synthetic

SEQ ID NO: 14154 - protein, 238 aa, Artificial Sequence
  Synthetic
SEIEDVIRRLRKILEDLERVSEKLLREIKKILDEARRLNEEVIKEIKRVLEDAVRVFRDGSGSKEELAKLVEELIRELAKLAKEVDEIHKRIVERLKALVEDAERIHRKIVETLEEIVRGVPSEELKRVVEAIVEVIKEHLKVLADVIRRIIKAIEENAETIKRVLEDIVRVLELVLRGEGSIEDLVREVERLIKRIEDSLRELEKTVRELLKRIKEASDKVREDVDRLIKELKEAAD

SEQ ID NO: 14155 - protein, 238 aa, Artificial Sequence; identical to SEQ ID NO: 14154
  Synthetic

SEQ ID NO: 14156 - protein, 238 aa, Artificial Sequence; identical to SEQ ID NO: 14154
  Synthetic

SEQ ID NO: 14157 - protein, 238 aa, Artificial Sequence; identical to SEQ ID NO: 14154
  Synthetic

SEQ ID NO: 14158 - protein, 246 aa, Artificial Sequence
  Synthetic
SREEIVATLEDLARKILEVVKKLAKEIEDAWREIERAVREILKRLEELWREIEDVVRKKVDSRVAEILETVVKRVVDITRRLIEEAERVVRELVDITRKLITILEEVVRRLVEIVREASKIDDRRELEDMLRKIREVVREVIERLKKLDEDVRRVVEEVIRRLEELNKRLEDVIREVKKRLKELGLSEEAVKELVELLEEILERNTRVIKEIIDLLRTVIRIHEKIVEDLIKLLEELLRRLEEATR

SEQ ID NO: 14159 - protein, 246 aa, Artificial Sequence; identical to SEQ ID NO: 14158
  Synthetic

SEQ ID NO: 14160 - protein, 246 aa, Artificial Sequence; identical to SEQ ID NO: 14158
  Synthetic

SEQ ID NO: 14161 - protein, 246 aa, Artificial Sequence; identical to SEQ ID NO: 14158
  Synthetic

SEQ ID NO: 14162 - protein, 237 aa, Artificial Sequence
  Synthetic
KEKEDALKKLEDLARKSREDLERVLRKHKKILDKIEELLKRVLDEHKKIVDDILRKTGTESEILKELARLLREHHEALRRLIEELRRLLEEHHKILEDLAREHKRLLDELIKVVADGVDKDELERIIKELRERDKKLVDDLRKVSEDLLDAVRKLVEDLERISRELLRRVEELAKGIDEELAREVERVIKELLDKSKEILERIERAIDELLKVSEEILKLSEDASEELLKILREFAK

SEQ ID NO: 14163 - protein, 237 aa, Artificial Sequence; identical to SEQ ID NO: 14162
  Synthetic

SEQ ID NO: 14164 - protein, 237 aa, Artificial Sequence; identical to SEQ ID NO: 14162
  Synthetic

SEQ ID NO: 14165 - protein, 237 aa, Artificial Sequence; identical to SEQ ID NO: 14162
  Synthetic

SEQ ID NO: 14166 - protein, 229 aa, Artificial Sequence
  Synthetic
SKEERLREVAEKHKKDLEDIVKRVDEAAKETARRLEEILKRLEEVLKKILDDLEKGPDDEKLKKVKKILKDIMDRLAELIKKILKLLKENLEKIKELLRRNLEISEELLKLAKGLSDRDVLETVRRVLEKLDEEWDRVLEDSRRIIETILRELDTLLREVEKLIKEIKDEISGSKEVLDILERAVEVVRRVIKALKEVLERHVDATREVIERVKRVNKRLLEAVREVVT

SEQ ID NO: 14167 - protein, 229 aa, Artificial Sequence; identical to SEQ ID NO: 14166
  Synthetic

SEQ ID NO: 14168 - protein, 229 aa, Artificial Sequence; identical to SEQ ID NO: 14166
  Synthetic

SEQ ID NO: 14169 - protein, 229 aa, Artificial Sequence; identical to SEQ ID NO: 14166
  Synthetic

SEQ ID NO: 14170 - protein, 241 aa, Artificial Sequence
  Synthetic
SEKELLKEILDRIRELLEDDNRLLKRIVDEIRKLLEEWLRVHKEILERIKELLDRIGAPEDVIRELTRALKETEEDVDRVIRTLEKLLKEVLDAHEEVVRKLDRLLKEVERLVEGGDAEEVVRDLLRVVKEILDESKAVIDELARVVDEILKLLEEVDRKLAKVVKEILEDVLRGSGDDEDAVRKIAKIIEELKRLLEDLARDTRRVIEEAKRLLKEWRDRNKEVADTLKKLLEDLIRKIR

SEQ ID NO: 14171 - protein, 241 aa, Artificial Sequence; identical to SEQ ID NO: 14170
  Synthetic

SEQ ID NO: 14172 - protein, 241 aa, Artificial Sequence; identical to SEQ ID NO: 14170
  Synthetic

SEQ ID NO: 14173 - protein, 241 aa, Artificial Sequence; identical to SEQ ID NO: 14170
  Synthetic

SEQ ID NO: 14174 - protein, 248 aa, Artificial Sequence
  Synthetic
SEDELLEKIVRKLAEAVKRIEEELRKSKREIERLVKEIKEKLEDSLARVKETLDRIRETRKGPSDEEVLERLVRTLEELLARHLKLIEDIARELKKLLKEHLDRIETIVRDLKRLLKEILDELERTGLPREALEAVRELVKTVARLLDEVLKNNKKLLDDLKKELDDVLANNKRIVDELARLLERVRRGKEDLEELLRLLKEVIERSIESLERLLELILRVLEYSVASLEELLRRLLEVIKRIVDTTK

SEQ ID NO: 14175 - protein, 248 aa, Artificial Sequence; identical to SEQ ID NO: 14174
  Synthetic

SEQ ID NO: 14176 - protein, 248 aa, Artificial Sequence; identical to SEQ ID NO: 14174
  Synthetic

SEQ ID NO: 14177 - protein, 248 aa, Artificial Sequence; identical to SEQ ID NO: 14174
  Synthetic

SEQ ID NO: 14178 - protein, 237 aa, Artificial Sequence
  Synthetic
DEDEIAEELKRLLREVEEASKEIVRRMRELAREANKASEDILRTLEKLLEELRRRVEESGGSSKAVLDKIREVLETLKELLDRHHETVRDLVRRLKELLDRHNETVAKLVEDIKALLDKSGGREEIKKRLEDALREHNRIIAEIKKLLDKVLKDHKDILDDIKKKLDDVLREVTEILKRGRIDEVVRRIERVIREVIKILARANKRLHDVVEEIIRLLEEVTDELRRVVEEVIRRTK

SEQ ID NO: 14179 - protein, 237 aa, Artificial Sequence; identical to SEQ ID NO: 14178
  Synthetic

SEQ ID NO: 14180 - protein, 237 aa, Artificial Sequence; identical to SEQ ID NO: 14178
  Synthetic

SEQ ID NO: 14181 - protein, 237 aa, Artificial Sequence; identical to SEQ ID NO: 14178
  Synthetic

SEQ ID NO: 14182 - protein, 246 aa, Artificial Sequence
  Synthetic
DAEEKAKKIEDVARRYAEEVKRVLDDLERLLRESEEEVERIVRKLEKLARDLEERVREGTKSEAVERLVRELLKAIKELIDVLRDVVRLSAEVIKELLDVLRELVELNLRAIKEIIEVLSKGKSEEVKKALDEILEKIEKVNTDVNRRLAEIIRKLREIHEEVLRELDKILRDIESVVRDVERGIDDKEVIDALKELLKVLEDLLREIKEALTRNLEKIDELLKLLHELSRRVIEELRKLLEDLKR

SEQ ID NO: 14183 - protein, 246 aa, Artificial Sequence; identical to SEQ ID NO: 14182
  Synthetic

SEQ ID NO: 14184 - protein, 246 aa, Artificial Sequence; identical to SEQ ID NO: 14182
  Synthetic

SEQ ID NO: 14185 - protein, 246 aa, Artificial Sequence; identical to SEQ ID NO: 14182
  Synthetic

SEQ ID NO: 14186 - protein, 240 aa, Artificial Sequence
  Synthetic
DEEELLREIKTILDESLKALEELIRKIMRILDKSLKDLEEIVREIKKTIDELLEKVRRSGLPEEVLKKVASVAEKVKEDIDRLLEDVERSHREVKKKLDELLKEVKRSHEEVKKELDSLRGDSDRDTVAREILRVLKKNLDVLAEVVEKIVKVLEDNLKSLKAVLETLVDLLRKLIKVLREGGLSEEALDDLRRLVKELADKLRKLLKDYKDLLKELKDEAKKLLDDYARLIEELEKKAR

SEQ ID NO: 14187 - protein, 240 aa, Artificial Sequence; identical to SEQ ID NO: 14186
  Synthetic

SEQ ID NO: 14188 - protein, 240 aa, Artificial Sequence; identical to SEQ ID NO: 14186
  Synthetic

SEQ ID NO: 14189 - protein, 240 aa, Artificial Sequence; identical to SEQ ID NO: 14186
  Synthetic

SEQ ID NO: 14190 - protein, 237 aa, Artificial Sequence
  Synthetic
SREELLDRILEAIAKILEDLKRLIDENLARLEEVVRELERIIDRNLKLIREILDELKKGSGSEEILEKIKKVDKELEDLIRRLLKKLEDLIRETERRLREILKRIRDLLKEVKDRDKDLERLLEVLEEVLRVIAELAKELLDSLRKVLKVVEEVLRLLNEVNKEVLDVIRELAKDGGSDEIIRKLDELLKEVEKVHKEVKDRIRKLLEDHKRSLDEVKKKLERLLERAKEVVEREKK

SEQ ID NO: 14191 - protein, 237 aa, Artificial Sequence; identical to SEQ ID NO: 14190
  Synthetic

SEQ ID NO: 14192 - protein, 237 aa, Artificial Sequence; identical to SEQ ID NO: 14190
  Synthetic

SEQ ID NO: 14193 - protein, 237 aa, Artificial Sequence; identical to SEQ ID NO: 14190
  Synthetic

SEQ ID NO: 14194 - protein, 246 aa, Artificial Sequence
  Synthetic
SEREELLERIKEILKRVKDKLDEDLKRLKEILEKLKEKADRDLEELRRRIEEVREKLERTGRTDELVKEVLDTVRRNLENLKRLVEDILRKLEENVKNLTDLVREILKLITELIKRLEDGGLPKEVLDALRRVLEKLEELLREILERLKRSLEAVKRKIEELLKELERSLDELRRALERIRKEIGDSETAVRAIIRVLEKHLEAVRRVLEELLKVLAEHLETVRELIERLKRVLEEAIEVVERVAR

SEQ ID NO: 14195 - protein, 246 aa, Artificial Sequence; identical to SEQ ID NO: 14194
  Synthetic

SEQ ID NO: 14196 - protein, 246 aa, Artificial Sequence; identical to SEQ ID NO: 14194
  Synthetic

SEQ ID NO: 14197 - protein, 246 aa, Artificial Sequence; identical to SEQ ID NO: 14194
  Synthetic

SEQ ID NO: 14198 - protein, 240 aa, Artificial Sequence
  Synthetic
DREKSVRDIEEDLKRVLDKLRRRVETSKEELKKVLKADKENADELEKTLRDVVRELDRGIDSEVLRAVREIVKRLVEVVRRYNELSEKIIRDLVRVNDRVLELLKRIVKRLIDVVRELEKIGDKEKALRRLEEVVKEVKRRIEELLKELEDVHRELVKILEEVNEDLKRVATEVKEIIKTGIKSSEVAKELDEVIKRLLDNLKENTDRLKEVIDRNLADLRDLAEELRAVIERLLEDARR

SEQ ID NO: 14199 - protein, 240 aa, Artificial Sequence; identical to SEQ ID NO: 14198
  Synthetic

SEQ ID NO: 14200 - protein, 240 aa, Artificial Sequence; identical to SEQ ID NO: 14198
  Synthetic

SEQ ID NO: 14201 - protein, 240 aa, Artificial Sequence; identical to SEQ ID NO: 14198
  Synthetic

SEQ ID NO: 14202 - protein, 252 aa, Artificial Sequence
  Synthetic
SLEEITKRLLELVEENLARHEEILRELLELAKRLAKEDRDILEEVLKLIEELLKLLEDNGSSEEDLKRLLKEVIEELRAVVKRVKDKWDEVVKRIEDLVKKLKELHDDTLRKLRELVRKIVTDISESGGEAEKVKRVVEKILELVERLAKVVKESVEKLLEILRELAEVSKRVAEALLRLLEELVRVIRIKDERTLREVVRKVLEEAKRLLDELEEVHKRVKKELEDIIEENRRVVKRVRDELREIKRELDE

SEQ ID NO: 14203 - protein, 252 aa, Artificial Sequence; identical to SEQ ID NO: 14202
  Synthetic

SEQ ID NO: 14204 - protein, 252 aa, Artificial Sequence; identical to SEQ ID NO: 14202
  Synthetic

SEQ ID NO: 14205 - protein, 252 aa, Artificial Sequence; identical to SEQ ID NO: 14202
  Synthetic

SEQ ID NO: 14206 - protein, 241 aa, Artificial Sequence
  Synthetic
SAEEAVEKLVRIARAIVKINEDLSREVVRILREIVRLNEETTRLLVEIAREVVKVVEDGGLSEDVVRKLRKLVKELEDLLKKSNDDIRKLVEDVARRLKESNDEIRRLVERLEELLKRGPGDEELLRLVEELTEELLRTHEEVVKALEKLTADLLELHRELLERVRRLTKRIEEELKRVGVSEELLRRLEELRKRLEKVLDDSAKELEKLKRELERLLEESRRKLEKLKRDLERVLEETRR

SEQ ID NO: 14207 - protein, 241 aa, Artificial Sequence; identical to SEQ ID NO: 14206
  Synthetic

SEQ ID NO: 14208 - protein, 241 aa, Artificial Sequence; identical to SEQ ID NO: 14206
  Synthetic

SEQ ID NO: 14209 - protein, 241 aa, Artificial Sequence; identical to SEQ ID NO: 14206
  Synthetic

SEQ ID NO: 14210 - protein, 237 aa, Artificial Sequence
  Synthetic
REDEVLRDIERLLREIEEKIRRILEESTAELRKVEEEVKRIIERTKRELKAIKEDVERKGIDEELRKLLDEVLDKLTKLIERNKRSLERILELIKRIIDENLEVLRDIIRLLEELLKATKDNGVPKDEVIKLVEDVVRRIEELVTRVVARNEKLVKDLDDLAKKNVRENEELLREIDRGLDEDLLEKIKRVIREHIKALEKLARDLKEILRRHIEALKELARDLAEVIRKLLEDVKR

SEQ ID NO: 14211 - protein, 237 aa, Artificial Sequence; identical to SEQ ID NO: 14210
  Synthetic

SEQ ID NO: 14212 - protein, 237 aa, Artificial Sequence; identical to SEQ ID NO: 14210
  Synthetic

SEQ ID NO: 14213 - protein, 237 aa, Artificial Sequence; identical to SEQ ID NO: 14210
  Synthetic

SEQ ID NO: 14214 - protein, 237 aa, Artificial Sequence
  Synthetic
SREDLLRSLAELIETILRKSSELLDRLLKLVREHSETSERLIRELKKILEDILKLIKGGISEDDVRRIVKEAKDELRRSVEEVKKSVDDLKEELKRSLREVRELVKSIADALEEIVRRSSGLGEVIKKLLELLRRLLEVHERTIRLLAELLERHLEVHEESIRLLLRLLEELLELVERKGDEKELRRIAEAVERVLRDHKAKNDKILRDVEEVLRRHLEELARILKDVKKVLDEARK

SEQ ID NO: 14215 - protein, 237 aa, Artificial Sequence; identical to SEQ ID NO: 14214
  Synthetic

SEQ ID NO: 14216 - protein, 237 aa, Artificial Sequence; identical to SEQ ID NO: 14214
  Synthetic

SEQ ID NO: 14217 - protein, 237 aa, Artificial Sequence; identical to SEQ ID NO: 14214
  Synthetic

SEQ ID NO: 14218 - protein, 239 aa, Artificial Sequence
  Synthetic
SEEDEVLKTLDRKHKEAKKELDKVLRELEEEHKKVKRELDEVLKRLEDIHRRITELLRRGGISLEDVLRMVKEANRELVEVIKRIVKTVEDLNARAVEVVKRLAEELERLNAEMVKVLRKSGRSEEIEKDLRRSSADIRRLVEEIERRLRDSLRKLRKLADDLAKKLKESLDKLEELVRRGVDEEAVERVLKENKELIEEIVRLIRKILDENIELIRRIVRLLERLLRENLRLIEEARK

SEQ ID NO: 14219 - protein, 239 aa, Artificial Sequence; identical to SEQ ID NO: 14218
  Synthetic

SEQ ID NO: 14220 - protein, 239 aa, Artificial Sequence; identical to SEQ ID NO: 14218
  Synthetic

SEQ ID NO: 14221 - protein, 239 aa, Artificial Sequence; identical to SEQ ID NO: 14218
  Synthetic

SEQ ID NO: 14222 - protein, 248 aa, Artificial Sequence
  Synthetic
SKEEDVRRLIEELVRELRRILEENRRMLKELVEKLEEVLRRSEEVWRRLAKELDELLKEGNSDAVREAVETIRRVLEDLVELDRRVVKVIKEVLERHAKSSTELVRELEDVLRAAVEAIEKGKSEEDLKRELRKLKERLKSVLKRHDDTNKELFRELEDVLRKHEEELRRLADELRRLLEDLKRSGDIPEEVIKKIEDLVRKTERELREVHKELRRLVEEAKEVVDRSVEILRDLVRKIVRILEESAR

SEQ ID NO: 14223 - protein, 248 aa, Artificial Sequence; identical to SEQ ID NO: 14222
  Synthetic

SEQ ID NO: 14224 - protein, 248 aa, Artificial Sequence; identical to SEQ ID NO: 14222
  Synthetic

SEQ ID NO: 14225 - protein, 248 aa, Artificial Sequence; identical to SEQ ID NO: 14222
  Synthetic

SEQ ID NO: 14226 - protein, 233 aa, Artificial Sequence
  Synthetic
SEKEAIKEVAELLKALIDDLLRLLKEDVDTARRVLDEIKKLLEENESIAREVLRRLREGKGAERAEELVREWIERTREILKRIEELLRRWTRKTREILKRIEELVRRVIEVVRRGGVPKELVDKLEEVLRKLLKLVEDHVRKVEKIISELLKLIKEHVEKVERIARKLLELLRRGGDETDLDRIVKEMEKVLEDSIRELEKLVKRLEDILRESEKALRDLLSELAKVLEEVRT

SEQ ID NO: 14227 - protein, 233 aa, Artificial Sequence; identical to SEQ ID NO: 14226
  Synthetic

SEQ ID NO: 14228 - protein, 233 aa, Artificial Sequence; identical to SEQ ID NO: 14226
  Synthetic

SEQ ID NO: 14229 - protein, 233 aa, Artificial Sequence; identical to SEQ ID NO: 14226
  Synthetic

SEQ ID NO: 14230 - protein, 237 aa, Artificial Sequence
  Synthetic
SREELLKELRKLVEEIKRRSEELLRRLEKLLEDNERRTRELLERLKELLREIEERIRGGGPSEEVIRLLEELVRAIERVLEEHLESNRRLVEAAESVLREHVELVKSLVRAIEDVVEKGLSEDKIRTIKKLLDEWARRLEKLVRDVRRKLEEWIKRTEEMIDEVARLLEELKETIRRKGGDEDTVRELTELVRRLLKRVEELLKRSLEILRELIKAIADAIKESLDILDRLLREVAR

SEQ ID NO: 14231 - protein, 237 aa, Artificial Sequence; identical to SEQ ID NO: 14230
  Synthetic

SEQ ID NO: 14232 - protein, 237 aa, Artificial Sequence; identical to SEQ ID NO: 14230
  Synthetic

SEQ ID NO: 14233 - protein, 237 aa, Artificial Sequence; identical to SEQ ID NO: 14230
  Synthetic

SEQ ID NO: 14234 - protein, 243 aa, Artificial Sequence
  Synthetic
SEAERLADEVRKAVKKSEEDNETLVREVEKAVRELKKNNKTWVDEVRKLMKRLVDLLRDGQVSDRDLLKELEEVLRRVLEALAENHERTEEILKRWLDRYAEDIERLRKVLKEVIEALKRGGSDDKRIVDELEEILRRNEDVLDKIAKRLRRLLEEDRRLLERIVRELKRLLDDLDRITKEGKSEELVRIAIEVLKRLLEIIEELVRLNNEILERLLKIVRELHKDNIKILEDLLRIIEEVLR

SEQ ID NO: 14235 - protein, 243 aa, Artificial Sequence; identical to SEQ ID NO: 14234
  Synthetic

SEQ ID NO: 14236 - protein, 243 aa, Artificial Sequence; identical to SEQ ID NO: 14234
  Synthetic

SEQ ID NO: 14237 - protein, 243 aa, Artificial Sequence; identical to SEQ ID NO: 14234
  Synthetic

SEQ ID NO: 14238 - protein, 245 aa, Artificial Sequence
  Synthetic
SEKDEVTRRIRELLKEAEETNREAIERIKRLLDRVREAVEEVAKRSEELLRRLKKVLDRGLQDDEALLKLLIDALREHNRLSTELIKILIDVLRTILKIIKDVLATNIEIARRILDLVRRLAERGGLDDRLVKEVEKLVRTAERLHRDALRKVKRLVEELEKRLRELVKTDHDLVRRLETLLRRGSGSKEDLLREIARILAESLRLIRELLKEIEKIVKEIIELLERLNDELRKIIEAILETTKK

SEQ ID NO: 14239 - protein, 245 aa, Artificial Sequence; identical to SEQ ID NO: 14238
  Synthetic

SEQ ID NO: 14240 - protein, 245 aa, Artificial Sequence; identical to SEQ ID NO: 14238
  Synthetic

SEQ ID NO: 14241 - protein, 245 aa, Artificial Sequence; identical to SEQ ID NO: 14238
  Synthetic

SEQ ID NO: 14242 - protein, 239 aa, Artificial Sequence
  Synthetic
SAEDLVRRVKDLVDKLEDKLRKVVRTNERLWEEIRKRLEELVRRNKELWDALVEKLKAGDKDKDELIEEAKSLEDESNALVEKLVRDIERVLAESNKLLDTLAKEIEEVLEEIVELVERGSGSDKEAREKLEDIKARLKEVLKKLREESKRIIDELRRLLEEYKRLVKEIRDRIEEVRKRNSEIRVLVELVRRHNKVLKELVEELEKLVRDHNRVVEEVVRELVELLSRAVEVIKEVVK

SEQ ID NO: 14243 - protein, 239 aa, Artificial Sequence; identical to SEQ ID NO: 14242
  Synthetic

SEQ ID NO: 14244 - protein, 239 aa, Artificial Sequence; identical to SEQ ID NO: 14242
  Synthetic

SEQ ID NO: 14245 - protein, 239 aa, Artificial Sequence; identical to SEQ ID NO: 14242
  Synthetic

SEQ ID NO: 14246 - protein, 232 aa, Artificial Sequence
  Synthetic
SEKELVDDIRRILEEILRLLRSLLEEVIRLLEENEKLVRRHLKTVIDILRRVAKLLDENGIRTDEADRVLERLEKAHRELLEDYKRALEKIKETLERVLREAEEVVKKIDDALRKLGGSKEVLKRLLEELLRLVEKIAEEIKRLLSELVRVTEELVRTNKELLEEAVRVIRKEVGDDSLVREVEELIKRLEKHIDDLLKTSRDLVKRVLDLVDEVVKRVEDLVERVKEKIDT

SEQ ID NO: 14247 - protein, 232 aa, Artificial Sequence; identical to SEQ ID NO: 14246
  Synthetic

SEQ ID NO: 14248 - protein, 232 aa, Artificial Sequence; identical to SEQ ID NO: 14246
  Synthetic

SEQ ID NO: 14249 - protein, 232 aa, Artificial Sequence; identical to SEQ ID NO: 14246
  Synthetic

SEQ ID NO: 14250 - protein, 247 aa, Artificial Sequence
  Synthetic
DEERLAEELERVLDRNRKLLEEALRELRRVIEENRKSVKRLLDELKRVLDELLKVLRELSRGDSDEELRKVIEDLIRKLTKVLDKVRSLVEENIERLARVLEKLERLARENLEDLKKVLDDVDKKLKDRRLVERLAELVRELIEVNKEILEMLKEIVRELLEINRTLLERLKDLVATALEIIKLLARGDGTEEDVERAVKEIRDRLRKLLEDYERAVRRLEDKLRRVRERYEAVLKRIKDKLEETKR

SEQ ID NO: 14251 - protein, 247 aa, Artificial Sequence; identical to SEQ ID NO: 14250
  Synthetic

SEQ ID NO: 14252 - protein, 247 aa, Artificial Sequence; identical to SEQ ID NO: 14250
  Synthetic

SEQ ID NO: 14253 - protein, 247 aa, Artificial Sequence; identical to SEQ ID NO: 14250
  Synthetic

SEQ ID NO: 14254 - protein, 243 aa, Artificial Sequence
  Synthetic
SRVEELKKLIEDILRISREVVERIARVAEDIHRINRRVLDDLRKLIEDILRTVEEILARKVSGTEAAEALRDTIRRVVDEIRKLLEEHEKRSAELLEEIRKLLEDILRRSERAVEEIRELLKKGVSTKDVLRIIEEILREHLELLERVVRRIEEILRELLKTIEEIVKRIKEILEELKEVLKRGSVGDDEVEREIRRVKEDLDRILEEYRRLLEEIKRKLEEILRRVEELHRRLRRKLEEIDR

SEQ ID NO: 14255 - protein, 243 aa, Artificial Sequence; identical to SEQ ID NO: 14254
  Synthetic

SEQ ID NO: 14256 - protein, 243 aa, Artificial Sequence; identical to SEQ ID NO: 14254
  Synthetic

SEQ ID NO: 14257 - protein, 243 aa, Artificial Sequence; identical to SEQ ID NO: 14254
  Synthetic

SEQ ID NO: 14258 - protein, 244 aa, Artificial Sequence
  Synthetic
DEDRRLEDAVAKLRKEHADIMKKLDDIMRELDEDHARIKERLDRILEELKALLTRVLRETREDELLRKVLELLTRLLKLLADVLEENKRLLEDILRLLKELIETNLRLLEEILALLRKVARGPVSEEEAKRLVEEITRLLEASTEEARKLVETIKRLLEESLDKLRSLVEEIERRLRTVLEEIRRRGAPEEIERIIRRVIEVIREILDLVRKVNKKALRVIEEILEDLARVNKKAVDAIDELAK

SEQ ID NO: 14259 - protein, 244 aa, Artificial Sequence; identical to SEQ ID NO: 14258
  Synthetic

SEQ ID NO: 14260 - protein, 244 aa, Artificial Sequence; identical to SEQ ID NO: 14258
  Synthetic

SEQ ID NO: 14261 - protein, 244 aa, Artificial Sequence; identical to SEQ ID NO: 14258
  Synthetic

SEQ ID NO: 14262 - protein, 240 aa, Artificial Sequence
  Synthetic
DEVEELLKRVRELLKASEELVRKILEDVKRLLERSIEEVEDLLRKVEELLKRLLDLVERGGSLDEILRELVRLLKEIVRKVLELNRKLVEDVIRIAKRLLELNAESVKEWDRILKLLRDGTGDKEELLKDAEEALEKYERAVREILKELEEIIKEYVRRVEELLKELKDAVDKAKDEVRKGSGDEDLIRDVDRVLKEIMDLLRDLVRRTKELLEELLRLLEELVRAHKELVRSILDEIRK

SEQ ID NO: 14263 - protein, 240 aa, Artificial Sequence; identical to SEQ ID NO: 14262
  Synthetic

SEQ ID NO: 14264 - protein, 240 aa, Artificial Sequence; identical to SEQ ID NO: 14262
  Synthetic

SEQ ID NO: 14265 - protein, 240 aa, Artificial Sequence; identical to SEQ ID NO: 14262
  Synthetic

SEQ ID NO: 14266 - protein, 247 aa, Artificial Sequence
  Synthetic
SEAEELLRELEELLKKSEKVLEDLLRKNAELIKDSKARLDEVRRKVEKLAEEVEEVIRRGVSEEELIRVIKKVLDDLRSIIKELIEVSRKYLRTTLELVKELLDVSRDVLREVLRIIKALLDTGGKDGSEEKIKEIADVADEIRKLAEEDIRLIKKLLEESAKLVDEDVRKLEEIAKEITELVERLRRTGDKDAVRKLIEELKKLLEDLVEHHERLLKEDHERLKALLDHHRELLKTVLTILRETAK

SEQ ID NO: 14267 - protein, 247 aa, Artificial Sequence; identical to SEQ ID NO: 14266
  Synthetic

SEQ ID NO: 14268 - protein, 247 aa, Artificial Sequence; identical to SEQ ID NO: 14266
  Synthetic

SEQ ID NO: 14269 - protein, 247 aa, Artificial Sequence; identical to SEQ ID NO: 14266
  Synthetic

SEQ ID NO: 14270 - protein, 245 aa, Artificial Sequence
  Synthetic
DEEELLRRVTEELKRLLDEARKLHEDVKRELEKLLKENDDLLADVKRKLESLLEALKRGSGTADEVIERILRLVEELLKRHAETVERILKLVRDLLRLHEKLVKEILDLLTRLLELLERRGGSGNSEKVDALKKLAKSVVDEVERSLEELRRLVEEVIKRIRDSLRASARIVKEAVRELRELLRDGRDADKLLERIRALLETLLEVLKRDNEEIKRILEELLRVAEENLRRIKEIIDRLLDATRR

SEQ ID NO: 14271 - protein, 245 aa, Artificial Sequence; identical to SEQ ID NO: 14270
  Synthetic

SEQ ID NO: 14272 - protein, 245 aa, Artificial Sequence; identical to SEQ ID NO: 14270
  Synthetic

SEQ ID NO: 14273 - protein, 245 aa, Artificial Sequence; identical to SEQ ID NO: 14270
  Synthetic

SEQ ID NO: 14274 - protein, 249 aa, Artificial Sequence
  Synthetic
DAEEVVKRLADVLRENDETIRKVVEDLVRIAEENDRLWKKLVEDIAEILRRIVELLRRGGVPEELLDRLAKVVKSIVEKAEKILERLNRVSKAIAEKLKTIVDELNEVSKEIVKRAEDILRKGKDKETVLRALRTLVKEYADLSKEVLERVERIVREYVKLSDEVVKSLAEIVEELIRIIEDLLRKGNLDEDVKRALEELVSRLRKLLEDVKKASEDIVREVERIVRELAKRSDEILKKLEDIVEKLRE

SEQ ID NO: 14275 - protein, 249 aa, Artificial Sequence; identical to SEQ ID NO: 14274
  Synthetic

SEQ ID NO: 14276 - protein, 249 aa, Artificial Sequence; identical to SEQ ID NO: 14274
  Synthetic

SEQ ID NO: 14277 - protein, 249 aa, Artificial Sequence; identical to SEQ ID NO: 14274
  Synthetic

SEQ ID NO: 14278 - protein, 240 aa, Artificial Sequence
  Synthetic
DKDKRLEELLKRLKELNDKTFEELERILEELKRANEASLREAERILEELRARIEGGNLDKRLAELLKKLLDDLKRLLEEYTRTNEELLKRLRELLERYRETNKKLLDLLRKLLDEARRTGTDEDLLRRLEDILRKYEDEVRRLLKELEDILREYEDTSRRLLEELERIAKEAAERVSRGSDKDVKDIIRTILEVARDLLRLLEEDSRTNSEVVKRLLDLLREDSKANSEVVKRLLDVLRE

SEQ ID NO: 14279 - protein, 240 aa, Artificial Sequence; identical to SEQ ID NO: 14278
  Synthetic

SEQ ID NO: 14280 - protein, 240 aa, Artificial Sequence; identical to SEQ ID NO: 14278
  Synthetic

SEQ ID NO: 14281 - protein, 240 aa, Artificial Sequence; identical to SEQ ID NO: 14278
  Synthetic

SEQ ID NO: 14282 - protein, 240 aa, Artificial Sequence
  Synthetic
SKEETLKRLLDELEKRNRETVERLERLLKELEDRNRASLEELEAVLEELERKIEESGLSKELKDTLARILEELRKLLEEYFRKNEELLRLLRKLLDEYARTNEELLRLLEELLDTARRTGGDSELLKRLEDIAREYEKRVRRLLEKLKDILDKYRKTVEELVRKMEEILKEAKKTISRIGSEEVKDIVRAMEEVIRRLIEILRRDVELNLDVAKKLLELLKEDSKLNLDVARELLELLDR

SEQ ID NO: 14283 - protein, 240 aa, Artificial Sequence; identical to SEQ ID NO: 14282
  Synthetic

SEQ ID NO: 14284 - protein, 240 aa, Artificial Sequence; identical to SEQ ID NO: 14282
  Synthetic

SEQ ID NO: 14285 - protein, 240 aa, Artificial Sequence; identical to SEQ ID NO: 14282
  Synthetic

SEQ ID NO: 14286 - protein, 243 aa, Artificial Sequence
  Synthetic
DEEETLRRLLERKVELAKEYLDVSKEVIDRTTKLLDEYLKTSKRIVDATVELLERGDLGPDELIKRLAEELERSLRELEEEIKRLKRELEESLKKLKEIIDRLAEEAEKLLAVLKRGEGSEEEALRALASLVRELIEVLRENDERLRDVLRRLIEALRKNNEILERVLRKLVRAAEERGRDESSREALEEARRRLEELLRELNEITKDLEAKLEKLLRDLNELTKALEEELKRLLDELKKRTD

SEQ ID NO: 14287 - protein, 243 aa, Artificial Sequence; identical to SEQ ID NO: 14286
  Synthetic

SEQ ID NO: 14288 - protein, 243 aa, Artificial Sequence; identical to SEQ ID NO: 14286
  Synthetic

SEQ ID NO: 14289 - protein, 243 aa, Artificial Sequence; identical to SEQ ID NO: 14286
  Synthetic

SEQ ID NO: 14290 - protein, 243 aa, Artificial Sequence
  Synthetic
SEAERTKESLKKVLKALVDLNRELLRKLEENMRELTKLNEEVKRALKEVLDKVREGGIVDKDAEREAERLMRELDKSSEDTARETRKLIEESKKSTRRTEEEARKLTETLDRLAKGGLPREDLLRALVRLLEELARLIEEDVRRNAELVKRHIELVERDVAELLRLIKELVDLLADLAEKGSRTEEIRKIVEEILKEIKELADRYREEVRKSKDKLRSILEDYKRKVDELKERLRELIEEVET

SEQ ID NO: 14291 - protein, 243 aa, Artificial Sequence; identical to SEQ ID NO: 14290
  Synthetic

SEQ ID NO: 14292 - protein, 243 aa, Artificial Sequence; identical to SEQ ID NO: 14290
  Synthetic

SEQ ID NO: 14293 - protein, 243 aa, Artificial Sequence; identical to SEQ ID NO: 14290
  Synthetic

SEQ ID NO: 14294 - protein, 239 aa, Artificial Sequence
  Synthetic
SEVEDILRRLAELNKRLIDKLRELIDRIARLNEELLRVVEDILSRLKRLADELIRVVRERGDIPEELLRKLEEELKKIVDELRRLVEEYEKALRDLIKELRKAVEEYRRTLAELVERLRRLEGPEELLKDLAEDVSRNIKAVEEVIRRFEKNVEDNIEVVRRLVDALEKLVRRLESVLRGKGSDEDLKRLLEKLKEDVERVLKEVRDRTAESLKHLEDVIRELEKKTEDSLRHMEERRK

SEQ ID NO: 14295 - protein, 239 aa, Artificial Sequence; identical to SEQ ID NO: 14294
  Synthetic

SEQ ID NO: 14296 - protein, 239 aa, Artificial Sequence; identical to SEQ ID NO: 14294
  Synthetic

SEQ ID NO: 14297 - protein, 239 aa, Artificial Sequence; identical to SEQ ID NO: 14294
  Synthetic

SEQ ID NO: 14298 - protein, 243 aa, Artificial Sequence
  Synthetic
DEERIIKTLEDINAKLVEDIKRILDKVAELNERLADAIRKILEETKRILEATTRKVRKDGEISEELLRRLEEKLRKLLEDLERVLAEHEDESRRILEEVERLLKRHADASKELLDRARSVARGVKSDKELVDRLKKLIDDSLESVRELIERLKELLDRLVKSVEDLIRTIKELLDRLVEVLREGVSDKDTLRTVEKLVEDVKRRLDKLLEDYKRLIEEVKKELDKLLKEYEDALREIKKRIDE

SEQ ID NO: 14299 - protein, 243 aa, Artificial Sequence; identical to SEQ ID NO: 14298
  Synthetic

SEQ ID NO: 14300 - protein, 243 aa, Artificial Sequence; identical to SEQ ID NO: 14298
  Synthetic

SEQ ID NO: 14301 - protein, 243 aa, Artificial Sequence; identical to SEQ ID NO: 14298
  Synthetic

SEQ ID NO: 14302 - protein, 232 aa, Artificial Sequence
  Synthetic
TEEEVVEDVKRVLDESHDDLRRLIETLTRVLRESLKRIKEALEELERVLKKLLDLLEGGRDAREVLDEIRKVLERLREVIEELLRINKEVLRELERVIRELLKKNEDLARRVRSGVKSRLLEVLERLARESLELNRAILEELRKLVEKSLRAVEKILKRLEEIVRKLLKLVEDGGPREEVKRVLEEARDELRRLLEEYKAIIEELERELERLLREHREVIRRIKEEIDKSSK

SEQ ID NO: 14303 - protein, 232 aa, Artificial Sequence; identical to SEQ ID NO: 14302
  Synthetic

SEQ ID NO: 14304 - protein, 232 aa, Artificial Sequence; identical to SEQ ID NO: 14302
  Synthetic

SEQ ID NO: 14305 - protein, 232 aa, Artificial Sequence; identical to SEQ ID NO: 14302
  Synthetic

SEQ ID NO: 14306 - protein, 234 aa, Artificial Sequence; identical to SEQ ID NO: 13912
  Synthetic

SEQ ID NO: 14307 - protein, 234 aa, Artificial Sequence; identical to SEQ ID NO: 13912
  Synthetic

SEQ ID NO: 14308 - protein, 234 aa, Artificial Sequence; identical to SEQ ID NO: 13912
  Synthetic

SEQ ID NO: 14309 - protein, 234 aa, Artificial Sequence; identical to SEQ ID NO: 13912
  Synthetic

SEQ ID NO: 14310 - protein, 240 aa, Artificial Sequence
  Synthetic
SLEEIVKKLEDLNKKAVEILRRVLEEHEKLVEKVKKVLRDVLRLLEKVVREVIETLKKGDTDEKTREALKELEEVVRKIKEEVEKVLKRLEEVSKRLKDEVRRVLKESEDVAKKIRRDVRGVRSEDAAKRATDLLKETLTILEEAIRRIVKVIEDSLEILREAVEAIVRLLEELLSILARIGLDEEVLRKLKEIIKELKDRLKKLLDDYERIIDELRAELERVLREYEKILEDLRKELED

SEQ ID NO: 14311 - protein, 240 aa, Artificial Sequence; identical to SEQ ID NO: 14310
  Synthetic

SEQ ID NO: 14312 - protein, 240 aa, Artificial Sequence; identical to SEQ ID NO: 14310
  Synthetic

SEQ ID NO: 14313 - protein, 240 aa, Artificial Sequence; identical to SEQ ID NO: 14310
  Synthetic

SEQ ID NO: 14314 - protein, 241 aa, Artificial Sequence
  Synthetic
SADEALEELVRRLLEVLKTVLERTKELSRDDLRVVKEVLRIIEELVKRLLKVIRDGLDDADRVLEEVERVIREAKREVKRWEEVVRKVVEDSRRLIERVLAEVEEVIKEAKRLLDERKSGGSREVIEELLSLLREIVRHHKEVSDEHLKLSAELVKRILDVVEETLRLATEIVRRIKEGGNSEDVRRDIERLLEELKRRVERLLEDIERLLAELEKLNEDVLRENKALLEDLERRVRERKK

SEQ ID NO: 14315 - protein, 241 aa, Artificial Sequence; identical to SEQ ID NO: 14314
  Synthetic

SEQ ID NO: 14316 - protein, 241 aa, Artificial Sequence; identical to SEQ ID NO: 14314
  Synthetic

SEQ ID NO: 14317 - protein, 241 aa, Artificial Sequence; identical to SEQ ID NO: 14314
  Synthetic

SEQ ID NO: 14318 - protein, 58 aa, Artificial Sequence
  Synthetic
DEVRKVLKDVTELSKTSEDKLEKVVREVKRKLDEVNRDLERVVREAKKLLREVRERLE

SEQ ID NO: 14319 - protein, 59 aa, Artificial Sequence
  Synthetic
DEVDEIRRRLKKLLDDSRKTSKDIERRLRELLDRNRRLVERVEEELRKLIKELEELVRS

SEQ ID NO: 14320 - protein, 58 aa, Artificial Sequence
  Synthetic
EEVEKVLKEARDVSEDSKRETTEVLKEAKKALEDINKRLREIVETVREALERVERALT

SEQ ID NO: 14321 - protein, 59 aa, Artificial Sequence
  Synthetic
DEKETVKDVVRRLVEKLEEVVKESKKLVDDLVKRAKEIVRESEELVRRNVRRAEEVARE

SEQ ID NO: 14322 - protein, 55 aa, Artificial Sequence
  Synthetic
EKVLKELEDAVREVKERIKKTNKELEEMVRRVEEEIRESDERLKKASEEVEEKIR

SEQ ID NO: 14323 - protein, 59 aa, Artificial Sequence
  Synthetic
SEMETVLDDVRRVVEESEELVKRARDRVKKLVDDLKRLVEKNEEDVKRVVDELDKLVEK

SEQ ID NO: 14324 - protein, 56 aa, Artificial Sequence
  Synthetic
EEVLEEARRLSERSREELRRVLEEARRLIRRVREELKRVHDKARRLVERVEEKLRT

SEQ ID NO: 14325 - protein, 59 aa, Artificial Sequence
  Synthetic
DEVEEVLERVKKVVADSEELVKRNRERVKKVVDDIRDLIRRNAETVKEVVKTIRELVKK

SEQ ID NO: 14326 - protein, 56 aa, Artificial Sequence
  Synthetic
EEALKDAERRSDESRKKLKKVHDDADRMVREVTRRLDEVHKEAEKRVREVLAELDT

SEQ ID NO: 14327 - protein, 60 aa, Artificial Sequence
  Synthetic
SIEEVLKEAHELNKEANKRLRDVEEDAKRLIEEVLRRLEDVLRESERLAREVLEELKRKG

SEQ ID NO: 14328 - protein, 56 aa, Artificial Sequence
  Synthetic
AKELRRRVERSVEESKRLVDELRKDVKRVVDEIRKVVEEDLRHAKRVVDEIREKVR

SEQ ID NO: 14329 - protein, 59 aa, Artificial Sequence
  Synthetic
DEAEEVKRVVEESVRRNEELVRRNEELVRDVLRRLKEVVDENERLVKEVVDRLRDLVRR

SEQ ID NO: 14330 - protein, 56 aa, Artificial Sequence
  Synthetic
ERVLKEVEELDRRVLEELKRVNDEARKRVRTLLEELRRVNEKVEELVRRILEELKK

SEQ ID NO: 14331 - protein, 57 aa, Artificial Sequence
  Synthetic
DEAEDVVRKVMDEIRKLIEVSKEILKELRRLVEELKKHSDRTVEELRRVVTELLKKE

SEQ ID NO: 14332 - protein, 55 aa, Artificial Sequence
  Synthetic
TDAVRRVRELLETVRRTSEEVLKTLEEFLRRVEKSTRRAEEELEEFLKRVEDRVK

SEQ ID NO: 14333 - protein, 61 aa, Artificial Sequence
  Synthetic
KEADKLAKELEETIERLKRDSERLVTDLERLLERLERRSRELVKRLRRHVEELLKTVRRDG

SEQ ID NO: 14334 - protein, 55 aa, Artificial Sequence
  Synthetic
REVIKKVEDLLREVEETSKRILDRVRELLKKVEDSSRRINEESKKLLKRVEEEAR

SEQ ID NO: 14335 - protein, 58 aa, Artificial Sequence
  Synthetic
SELEKILEDLKRVAERVAKALDRSLRELEKVLRRVEEELTRSNERLREVVKEVEDAAD

SEQ ID NO: 14336 - protein, 56 aa, Artificial Sequence
  Synthetic
DEEVRKLVEDLARRLDDIVRRSEELSRKLAEDVEEIVERSKRLSEELAREARELVR

SEQ ID NO: 14337 - protein, 60 aa, Artificial Sequence
  Synthetic
SEIEDVVRKVETLARESDERVKTLMEENKDLAEKLKKLVRDVVEKVKREVTRLLDEVRRR

SEQ ID NO: 14338 - protein, 58 aa, Artificial Sequence
  Synthetic
EELKKVKERLDEAERRSKELIDEADRLNREMLKRVKEAIKKVKETLDKALEDVERAVR

SEQ ID NO: 14339 - protein, 57 aa, Artificial Sequence
  Synthetic
SDLERVEERLERAVREVEKLHEDSRRELRRVVKEVHDSTRKVEERNRKLVKRVEEAD

SEQ ID NO: 14340 - protein, 55 aa, Artificial Sequence
  Synthetic
KKVIKKLEDMLREWAKLVEKSIKELKELLEELRKVSKKLVDDNDRLAEELKRRVD

SEQ ID NO: 14341 - protein, 61 aa, Artificial Sequence
  Synthetic
DEVKALVDKVRELVRKLKEESDDLVRRNEELAKEVEKRSREVVEKVRDTVRKLLEELERAD

SEQ ID NO: 14342 - protein, 55 aa, Artificial Sequence
  Synthetic
KKVRDDLRKALEDVNRSSKRVEERDKEVLDEAHRSSTRVLETLKRMLERLDEKIR

SEQ ID NO: 14343 - protein, 61 aa, Artificial Sequence
  Synthetic
DEVEKLVKKVEDLVKRLIEVSEDVVREVEKRLRELEKVHREALRKNRKLLEDLLRRLREAD

SEQ ID NO: 14344 - protein, 55 aa, Artificial Sequence
  Synthetic
DKVREKLKRALDRVNKSSREVEETLRRADKRLNDLVKEIKDEDKRMLERLERETQ

SEQ ID NO: 14345 - protein, 61 aa, Artificial Sequence
  Synthetic
KEVEELVKEVRKLATKVIETSKRVVEELEKLAERLLRTSKEVVKRNKELVDDLLRRVREVS

SEQ ID NO: 14346 - protein, 55 aa, Artificial Sequence
  Synthetic
EEVRKELRELLRRVNESSKDVKRRLEDLDREINRLSKRVKEEDRRALKEVEEEIK

SEQ ID NO: 14347 - protein, 60 aa, Artificial Sequence
  Synthetic
SKEEEVKRVLREALERVEELNKRLNEEDKRMLDEVRKVNRDAERVLREALKRVEELLSRV

SEQ ID NO: 14348 - protein, 55 aa, Artificial Sequence
  Synthetic
DELVTDVERVVRELLDHVRRLVRESKELARELIRRSEEIVRTVEEVVRKLEKDVR

SEQ ID NO: 14349 - protein, 60 aa, Artificial Sequence
  Synthetic
DKAKKVEELLRKAIEEVEKLNDEVNRTDEKMLRRVKELNDDVHRTLEEAIKRVRELLSRV

SEQ ID NO: 14350 - protein, 55 aa, Artificial Sequence
  Synthetic
DEVVTEVEKLMRELLEHVKRLIDESRKLAADLEKHSRDIVEEVRRLVEELLRTVK

SEQ ID NO: 14351 - protein, 60 aa, Artificial Sequence
  Synthetic
SKERDVERKVREVIKRVEDLNKRVHKTLEDVIREVEKLNEEVKTRVEKLIREVEELLKRV

SEQ ID NO: 14352 - protein, 55 aa, Artificial Sequence
  Synthetic
DRVVEEVERLLRELEKHSKEIEEAVDRLVRKLEEHVKKVVEEVARLVAELKERVK

SEQ ID NO: 14353 - protein, 60 aa, Artificial Sequence
  Synthetic
SVAEEVKKVKDKLKKDVERLNEEDRRVLEKAKRESKKLLDEIKRVLEELERKLEELLRRD

SEQ ID NO: 14354 - protein, 55 aa, Artificial Sequence
  Synthetic
KEVVTEIRRVVKELLDKVRESIKETERVVRELLERNRKILKEIREVVRKLLEDVR

SEQ ID NO: 14355 - protein, 61 aa, Artificial Sequence
  Synthetic
DEARKLLEELKRLAERVLKTDTDLLDESRRILEEVLKTNKKSIEDSKRLAEDVLRKVAREG

SEQ ID NO: 14356 - protein, 59 aa, Artificial Sequence
  Synthetic
EEVLDRVREIMERVLTESKELNDRIHTISRKAEEDSKRLNEEDRAIMEDVRRELKRVVD

SEQ ID NO: 14357 - protein, 61 aa, Artificial Sequence
  Synthetic
SEAEKLLEELRTIAKEVLDRVRKMLRESEKLAEDVLRENKKSIEDSRRIAKKVLDELRRDG

SEQ ID NO: 14358 - protein, 59 aa, Artificial Sequence
  Synthetic
EEVLERIRRIFEDVLRKLRKLLDEIHRISEKVKKESEELNEEDKRIVDDAERRLEDLER

SEQ ID NO: 14359 - protein, 60 aa, Artificial Sequence
  Synthetic
SVKDAVEKILREAEETVKRLNEETKRRLDEAREESKRLIDEVRRILEKLKEVLDEVLRRV

SEQ ID NO: 14360 - protein, 55 aa, Artificial Sequence
  Synthetic
EELLERVKRLMDELEETSRRILEEVERVIRRNKELADRILKEVAELLKRLEEELR

SEQ ID NO: 14361 - protein, 60 aa, Artificial Sequence
  Synthetic
DEAEELRKTVEDIMKELREELKRLEEESRRIMEELKKRLEKLIEDSRKAAEDLKREADRL

SEQ ID NO: 14362 - protein, 59 aa, Artificial Sequence
  Synthetic
KRLLEEIKERVDRVKKELDEADKRINDSSREVEKTLEDLDRKINKSSEEVRRVLEEAER

SEQ ID NO: 14363 - protein, 60 aa, Artificial Sequence
  Synthetic
DVEETLTRLLKEILDVVRKALRDTREIVRDVRRVSEEVLKELEDLLREVDREVKRVLAEL

SEQ ID NO: 14364 - protein, 56 aa, Artificial Sequence
  Synthetic
DTEVVKRIRELVEKLRELVKRSNDNLKEHVKRNKELAKRLLDELRKLVEDLKRARK

SEQ ID NO: 14365 - protein, 60 aa, Artificial Sequence
  Synthetic
DMEEEVKKLIDEVRRVLEEVLKRVEDIIDASRRTLKKVVDDVRRIDEDVERELKEAEKRG

SEQ ID NO: 14366 - protein, 56 aa, Artificial Sequence
  Synthetic
KEEVLREVDRLVKKVEKTARELLRLLEESIEKSKREAEKLLRSNEDVVRRVRERVR

SEQ ID NO: 14367 - protein, 56 aa, Artificial Sequence
  Synthetic
DAEEDAKRLLKEVKDLLDEVRERHRELNERSRKVLEDARKTHEDLNEESRKTLEDR

SEQ ID NO: 14368 - protein, 55 aa, Artificial Sequence
  Synthetic
REARELLKRILKDIERILETVVRLSERDVEEVRKIMEELKKLSDDDLKRVEEEAR

SEQ ID NO: 14369 - protein, 56 aa, Artificial Sequence
  Synthetic
SAREEIEELIKRVKDTSKKILEDVRRMIERVKRKSKKIKEDAKRLIERVEKLLRDS

SEQ ID NO: 14370 - protein, 56 aa, Artificial Sequence
  Synthetic
KDELRELIKRLEDHSRRVVEEVARLVKELDEHSERVLKTLEDLIRRLDELVKRVTT

SEQ ID NO: 14371 - protein, 57 aa, Artificial Sequence
  Synthetic
KAEETVKELLDRVERISERARKEVRELLERSKESTKRILDEAREMIKRSRDELRRVG

SEQ ID NO: 14372 - protein, 56 aa, Artificial Sequence
  Synthetic
LEDLERLARELARHSEDVMRRLRDLARKDKELSEDLVRRLRELVKRDLDLVKTVKE

SEQ ID NO: 14373 - protein, 56 aa, Artificial Sequence
  Synthetic
SMEDRLREVNEKNNRLIEDATRKSERVLDKIRELLKEVKRRSEDVLRRIKELVEKL

SEQ ID NO: 14374 - protein, 59 aa, Artificial Sequence
  Synthetic
EKTLKELVEKIEKVAEDSLREAEEDVKRIEDLVREIKKRADDDVRRLEDRVRRLRERLE

SEQ ID NO: 14375 - protein, 59 aa, Artificial Sequence
  Synthetic
SSVEEVVEEIERLVDELRKRAEELVRESEKLVAELERRIRKLVEDSEKLVKDLKDRAAK

SEQ ID NO: 14376 - protein, 59 aa, Artificial Sequence
  Synthetic
DKVLRKIEDVDRRLKELVRRVKKKDRDSNERVKELVKRLNDENEKVLKRVEELVRRDKT

SEQ ID NO: 14377 - protein, 60 aa, Artificial Sequence
  Synthetic
DEIKKVVKDLEDLVKRLKDEVDRHVRENERIVEELKRNVDRHVEENRRLVKTLEDEVRKG

SEQ ID NO: 14378 - protein, 55 aa, Artificial Sequence
  Synthetic
EDLKRVLKAVEDVVREAKERLERVNRTIREVVKRAREKLKRVHDTIRKVVDDARR

SEQ ID NO: 14379 - protein, 59 aa, Artificial Sequence
  Synthetic
DEVEEVLKELKRSVDETRKLLKKIEDEAKRNVRRNEELAERVKRTVDRLVEELRDLIRR

SEQ ID NO: 14380 - protein, 55 aa, Artificial Sequence
  Synthetic
EKLKRAEKEDEEVVRRIRELIERLREENEDVIRRAEELLREVVKRIEEVITEARR

SEQ ID NO: 14381 - protein, 60 aa, Artificial Sequence
  Synthetic
SVEDEIRRVIEELDRLLRKDKETIKRVIKELRDLLREVKKRTEEMIRRLDELLETVTRRI

SEQ ID NO: 14382 - protein, 56 aa, Artificial Sequence
  Synthetic
VDDVRRLAKEVLDEVKKSVDETKRLADEVKTRVRKNVKDNTDLAREVLRRVAERAR

SEQ ID NO: 14383 - protein, 60 aa, Artificial Sequence
  Synthetic
SRLEKLVKEIRDVVRELAERVKESVDRARKVVKEDLEHAEESVRRVKKVVKELEELVRKL

SEQ ID NO: 14384 - protein, 55 aa, Artificial Sequence
  Synthetic
KDIKEVEKRLKDVLDEAHKLNKRTNDELKRVNKESNDLNRKTEEDLKRVLERAED

SEQ ID NO: 14385 - protein, 59 aa, Artificial Sequence
  Synthetic
KRKEDLVEEIRKIVKAVEDEVRRSVKESEDSVRENLKEAERIVRELEEIVKELEKLVRD

SEQ ID NO: 14386 - protein, 55 aa, Artificial Sequence
  Synthetic
ELLEDVRKKLEDVLREVEKLNKTVEDKNREVLRRIDELIRRVEEAIEDVRRKVEK

SEQ ID NO: 14387 - protein, 59 aa, Artificial Sequence
  Synthetic
DEKEELVKRVEDKVKDLRDKVEKSVRESTESVRDNERRVRESVERSRDLVRRLDELVRA

SEQ ID NO: 14388 - protein, 55 aa, Artificial Sequence
  Synthetic
EELERVRKELEEVLRRAKRLNEDVLEKNREVVRRAAELNKEVKKLLKEVLDRAKT

SEQ ID NO: 14389 - protein, 60 aa, Artificial Sequence
  Synthetic
DEKEDIDRRLRDMVRRDRELARRSVEEARKLVDKNRKLVERVFRELKKLVDELDELVRRR

SEQ ID NO: 14390 - protein, 55 aa, Artificial Sequence
  Synthetic
KLLKDLEEELRKTREEVHRLNEETNRRLDKVNKDARDLVRELEELIEDVLRKVET

SEQ ID NO: 14391 - protein, 59 aa, Artificial Sequence
  Synthetic
DEKETVEERLDRLVRHHEKLVRESVKELEELVRHNRELIKKSVEDARRLVEDLKRLIDE

SEQ ID NO: 14392 - protein, 55 aa, Artificial Sequence
  Synthetic
KLLDELRERIDKVNEDARKLNEEVERRITESEKEVTDLNRKVDEDIKRVLEKVER

SEQ ID NO: 14393 - protein, 60 aa, Artificial Sequence
  Synthetic
SVEKVVKDVTDTIKKVVDDARRLSEEVVERNERVNKKLERLSREVVERIKDVLKRLRDKK

SEQ ID NO: 14394 - protein, 56 aa, Artificial Sequence
  Synthetic
VEDLKRDADRIVEDIKRVVKELVKHAEKSVEDLERVVKEIVKDAERIVREIEKRVK

SEQ ID NO: 14395 - protein, 60 aa, Artificial Sequence
  Synthetic
DVEEVVRRAREENKRSHDEVRELVKEVNERNKTVLERIKELAERALREIREVLREVDERK

SEQ ID NO: 14396 - protein, 56 aa, Artificial Sequence
  Synthetic
TEKLKEDLDRIVRTSEELVRRLLERARRMVRETEELMRELLTEVKRIVEEVARRVK

SEQ ID NO: 14397 - protein, 59 aa, Artificial Sequence
  Synthetic
DKEELLKRVTEKLEKVSDKSRRLIEEVEREVEKVHREVEERVRKVREDVRDVLRKIRAQ

SEQ ID NO: 14398 - protein, 56 aa, Artificial Sequence
  Synthetic
TELVLREVERLVAENERSVEELKKELEKLVRRNRTLVRKIEEDVRRLVEKITKRRE

SEQ ID NO: 14399 - protein, 59 aa, Artificial Sequence
  Synthetic
SDSERVKKEAEDVLREIKRLIERNKRLAEETSERIRRLLEELKDLADKIVETLKDLIDR

SEQ ID NO: 14400 - protein, 56 aa, Artificial Sequence
  Synthetic
REVVDEVEKRIRELLERLKDVSKKVEESNKKLLDEIRETVERVKKRIKELLEELRR

SEQ ID NO: 14401 - protein, 60 aa, Artificial Sequence
  Synthetic
SLEEVVEEVKRRLTKLLKEIEDVIRRAEEESRRLLEEIERVIREAEKESRRLLEEIRTAG

SEQ ID NO: 14402 - protein, 56 aa, Artificial Sequence
  Synthetic
EDLVRKLAKELLDTLREVLKRIEEIAKEVLDLNDESLKEIRRIVEEDLRKLEEKMR

SEQ ID NO: 14403 - protein, 59 aa, Artificial Sequence
  Synthetic
SEEEEVKRLLDDVREKVKRVAEENRRTVEEVKRVVDEVRRRNKETVERDRRELEKVARD

SEQ ID NO: 14404 - protein, 55 aa, Artificial Sequence
  Synthetic
EEVVREIRRIVEDVRRKVKESVDRVKKILEKVRKDVEDSVREVERTMKKVSDDVT

SEQ ID NO: 14405 - protein, 63 aa, Artificial Sequence
  Synthetic
SKEETAKRLIEEVRKVIEEVKKRAEDSNDHNRRSIEEVEKTLKRLIDEVRRVVEEVKEKISRT

SEQ ID NO: 14406 - protein, 55 aa, Artificial Sequence
  Synthetic
KEAVEEIERLMRKIKKVVEDSVRNVERTMREVEEKVRKVEEDVRRLAEDVTRAVK

SEQ ID NO: 14407 - protein, 56 aa, Artificial Sequence
  Synthetic
DEVEEVLRRVRKIVKEDRDEAKDVREENRRLVEDDKRKVERVKEENRRLVEELRKR

SEQ ID NO: 14408 - protein, 56 aa, Artificial Sequence
  Synthetic
RRLLEEVERRVEKLVKESREIAKRSNDRTKDLVRRSEEILRESNERTRRLLEETER

SEQ ID NO: 14409 - protein, 56 aa, Artificial Sequence
  Synthetic
SEAEKVLKDIEKIVKDLERNAKEVLDRNKRNVEDDKRAAEEVLEKLERIVREIDRG

SEQ ID NO: 14410 - protein, 56 aa, Artificial Sequence
  Synthetic
RELLKKVIRTVEKLLEDVHKLNEDSERAAKKLTDESREIAREVEERVERLLREEER

SEQ ID NO: 14411 - protein, 57 aa, Artificial Sequence
  Synthetic
REVEEAEKRLREIVKEVTERNKEVVERLRDIVRKSEDDSRKSVETNKEIVDRVRRDV

SEQ ID NO: 14412 - protein, 56 aa, Artificial Sequence
  Synthetic
RDVLRELIRTLEEVLKRSEDTNRELEKRIKEVVEDNRRKLEESIKESEKVVDEIRK

SEQ ID NO: 14413 - protein, 57 aa, Artificial Sequence
  Synthetic
SEVEEAERRLKEIAEESKEISKRSVETNAKILDEVRRENTRVLETLKKILEEVERRV

SEQ ID NO: 14414 - protein, 56 aa, Artificial Sequence
  Synthetic
KDELERLIEDIREVVERNKKIADESIKRSRDVVKRSKETNDELEKTIREVVKRIED

SEQ ID NO: 14415 - protein, 57 aa, Artificial Sequence
  Synthetic
DEVEEVLKRLRDILREAKELVERSVKRNEEIAEESRKESEESVRRNEEIVDAVRKRV

SEQ ID NO: 14416 - protein, 56 aa, Artificial Sequence
  Synthetic
RRVLERLIRELERVLEELREKLKRSIEESEDVVRKNREILRRSIEKSEDVVRKIET

SEQ ID NO: 14417 - protein, 59 aa, Artificial Sequence
  Synthetic
DVDEVLDTVRRLVEELLKKVERTSRESVRLAEKLLDEVRESSKRSKDESRRLLEEVREI

SEQ ID NO: 14418 - protein, 59 aa, Artificial Sequence
  Synthetic
REKVDKVRRDVERLVEEVEKTVKRSVEENRRIAEEIKRTVEESVKTNEEVVKRIEETAR

SEQ ID NO: 14419 - protein, 58 aa, Artificial Sequence
  Synthetic
RERELVEEVERRLRESNERVKESVDRSRKLLETSHRRVKELVDRLKRVLERVEREVRN

SEQ ID NO: 14420 - protein, 55 aa, Artificial Sequence
  Synthetic
DELVKRVKEVVDHNERLAEESKKEVDDVVRRNEDLVRKVVEEVKDVVRRIKETVR

SEQ ID NO: 14421 - protein, 58 aa, Artificial Sequence
  Synthetic
RERELVEEVERELKRSTREVEESIEESRKRLEESHRLVAELVKRLEEVLERVRDDVRR

SEQ ID NO: 14422 - protein, 55 aa, Artificial Sequence
  Synthetic
DELRKRVEEVVRTNEELARESVRKVKEVVRRNKELVARVADKVREVVKRIRETLK

SEQ ID NO: 14423 - protein, 59 aa, Artificial Sequence
  Synthetic
SVKEIVKKVVEENKKSDDELREFARRVAERNKRVVEELKKRLEDLVRKNEEVVDRLRKR

SEQ ID NO: 14424 - protein, 59 aa, Artificial Sequence
  Synthetic
SEIVKEVVDRVRKSEESSRKLLEEIVRLVEKSLEEVKRILDEIRRRVEKSERDVRRLRK

SEQ ID NO: 14425 - protein, 57 aa, Artificial Sequence
  Synthetic
DIVEELKENVKRVEETIRKIVKEARENVDDVLKKNKDNVEHDKRTAEEVLKEVKKSI

SEQ ID NO: 14426 - protein, 60 aa, Artificial Sequence
  Synthetic
KDTVRRLLEEASKLNKDVIRRVRELLKRLHERNEESLRRARELNERSRREAERVLEEVRK

SEQ ID NO: 14427 - protein, 60 aa, Artificial Sequence
  Synthetic
SIVDRIREIMKEVREKVKRVVEENRRNAERIKRRVDEVVKTNRKTVDDVRRKVEDVVRKI

SEQ ID NO: 14428 - protein, 60 aa, Artificial Sequence
  Synthetic
REVVEELLRRLRKIVKDVERELKRSTEELNRRSREVLKELEKSTRDVEKVVRELEERLRK

SEQ ID NO: 14429 - protein, 60 aa, Artificial Sequence
  Synthetic
SVVDKIREIVRKSREDVRRVVEEIKDNARDLKRKAEEVVKEVKRIVDEVRETVRDVVEKI

SEQ ID NO: 14430 - protein, 60 aa, Artificial Sequence
  Synthetic
EEEARKLLEDVKKSSDDVRRELKRLLEEVNRVSREAEKKLRELLERVKRIIDTLKDELRK

SEQ ID NO: 14431 - protein, 60 aa, Artificial Sequence
  Synthetic
SVKDEIRRIVKESEEANRDVVEKIRRNVERIRRKVERVVEEIKRIVKEVKEKVEDVVRKN

SEQ ID NO: 14432 - protein, 60 aa, Artificial Sequence
  Synthetic
EEVVRKLLEEVKKSSDESKDRSRRLLEEVNRISRDVERKLEELLRKVEKVVRDLEEELRR

SEQ ID NO: 14433 - protein, 58 aa, Artificial Sequence
  Synthetic
SAEDVVRELKKRVDRSREDNTRVLEELKKAVEESRRLNEESNRRLEKIVRDIKEDLKR

SEQ ID NO: 14434 - protein, 59 aa, Artificial Sequence
  Synthetic
EEVLRELAKIREDIERENKRVLEELEDVLRKVKRVNEEALKNSEDILRDIKEKVDRRRK

SEQ ID NO: 14435 - protein, 59 aa, Artificial Sequence
  Synthetic
SVEELLRKLEEVLRKIREENERSLKELRDRAREIVKRNRETNRELEEVIKELEKRLSRR

SEQ ID NO: 14436 - protein, 59 aa, Artificial Sequence
  Synthetic
EDIVRKIERIVETIEREVRESVKKVEEIARDIRRKVDESVKNVEKLLRDVDKKARDRKK

SEQ ID NO: 14437 - protein, 61 aa, Artificial Sequence
  Synthetic
SEEEKVKEEIRKLIEDSRRHVDELKKRLEKLLRDSEKNVEDAHRTNEKLARELKEKVKKTG

SEQ ID NO: 14438 - protein, 55 aa, Artificial Sequence
  Synthetic
EDVLREAEEMLRDSNRELREILEKIERDLRKSDEELKKSVDDLRRLIKEVEDRLK

SEQ ID NO: 14439 - protein, 61 aa, Artificial Sequence
  Synthetic
SREEELKKELKKRIEDSDRHVKEEKDELDRLIRESEEHVKRLKEEARKKLERLKDLVRKDG

SEQ ID NO: 14440 - protein, 55 aa, Artificial Sequence
  Synthetic
EKVLREAEELLKEVDRKLERILEEIKRRLEKSDRDLRRVLKELEELIDEVRRRLE

SEQ ID NO: 14441 - protein, 61 aa, Artificial Sequence
  Synthetic
SEKEDIKERIKELLKRSEENVRKLREENRELVRRSEENVKEIHKENEDLIRKLEKLRTRDV

SEQ ID NO: 14442 - protein, 55 aa, Artificial Sequence
  Synthetic
EDVLREAKEALEESLRRLRKIHEDSERRLRESLEELRRSVEEAKRLLERLKRELD

SEQ ID NO: 14443 - protein, 61 aa, Artificial Sequence
  Synthetic
DELDRVIEEAEELIRRIEEKLRRINETAKRLLDENLRHSERVHEEINRALERVRKKVEDAG

SEQ ID NO: 14444 - protein, 56 aa, Artificial Sequence
  Synthetic
VKDVKDRLRRIIEELERRVRELKKRHEDILRELNRRSKELKDRHKKILEDLDRRVR

SEQ ID NO: 14445 - protein, 61 aa, Artificial Sequence
  Synthetic
EEVERVIDEARRLLRENERHSEEVIEEITKLIRDVEEKVKRINDRAREALEDIREEVKRKG

SEQ ID NO: 14446 - protein, 56 aa, Artificial Sequence
  Synthetic
VDELRKELERLIRDLNRLSKRIKEELKRRIEELEEEVKRLKEEHERIIEELRRRVK

SEQ ID NO: 14447 - protein, 59 aa, Artificial Sequence
  Synthetic
EEVERAKKELEDRIREWEEDSKRLKDELKRIIKEWEDESRRVKEELRKIIDDLRKAVEK

SEQ ID NO: 14448 - protein, 55 aa, Artificial Sequence
  Synthetic
ERILEEARRLVRRVHESSKRVLDDARRKLKELHERSKRVLDDVRRKLKKVADDTR

SEQ ID NO: 14449 - protein, 60 aa, Artificial Sequence
  Synthetic
SEVERIKEELKRIIEDWDRRSRRLKEELKKEIKDWEEDSRRLKRELEEELKKLKEKVERG

SEQ ID NO: 14450 - protein, 55 aa, Artificial Sequence
  Synthetic
KKIIDEARRLLEELHRKSREVAKEIRKEVKRLHDTSKKVLEDIRRAVKKVADDVK

SEQ ID NO: 14451 - protein, 59 aa, Artificial Sequence
  Synthetic
SEVEKIKRDLEEIIRRWEEDIKRVKKRLDEEIRRWEEESKKVKKKLEDLIRRLEKEVAD

SEQ ID NO: 14452 - protein, 55 aa, Artificial Sequence
  Synthetic
EKILEDARREAERLHKTSKDVLKKVEDLLRRVNEHSRRVLEEAERRIRDVAEKTR

SEQ ID NO: 14453 - protein, 59 aa, Artificial Sequence
  Synthetic
SEVEDIKRRLEKIIEDWRRKSKELEKRLEDIIDEWDKRSRKLKEDLKRIIEEARKAVDD

SEQ ID NO: 14454 - protein, 55 aa, Artificial Sequence
  Synthetic
EKVIKEAEDLLRELNESSRRVAKKAKDDLRELNERSRRALKEIRELLREVRERVE

SEQ ID NO: 14455 - protein, 61 aa, Artificial Sequence
  Synthetic
REVEKIITDLEEVIRRVEEYLKRSDEELEKELRRVKRYLDKSDKDLRDEIRRVKEELDKRG

SEQ ID NO: 14456 - protein, 56 aa, Artificial Sequence
  Synthetic
KDELRARVEDVVRRAEDELRRHSELNKRLVDEARKLLEDHSRRNEELMRELRKLVE

SEQ ID NO: 14457 - protein, 60 aa, Artificial Sequence
  Synthetic
SELEDILRKLEKRMTDVERYLDESNKDLERAVRRVVETLKRIDDEIRRLLEEVERDLDRK

SEQ ID NO: 14458 - protein, 56 aa, Artificial Sequence
  Synthetic
KDELETRLREITKTAEDELRKHSRTNEDIVRELKELVDEHEKELRKVVREAEDESR

SEQ ID NO: 14459 - protein, 61 aa, Artificial Sequence
  Synthetic
SELEEILKDLERMIREVEDYLRKSNERLEDVLRKVKKKLDEINDELRRVVEEVKKKLEDKG

SEQ ID NO: 14460 - protein, 56 aa, Artificial Sequence
  Synthetic
AEELKRRLEEIVKRARDLLKEHSDDNERLVERAERLVEEHRDKVRKIVEELEEEVR

SEQ ID NO: 14461 - protein, 61 aa, Artificial Sequence
  Synthetic
SEIERILEEVERAVRESDERLKDIVRKDREVVKRVKELLDKILRKDEEAIKRVIEDLERRG

SEQ ID NO: 14462 - protein, 56 aa, Artificial Sequence
  Synthetic
KDELKKEVDKWVKRARDIVKELEEHSRRSTDELRRTVEDLERHSEESVRRAEKTSE

SEQ ID NO: 14463 - protein, 61 aa, Artificial Sequence
  Synthetic
SELEKILKKIEDALKKVEEDLDRILEEDRKTLEEVKERLERDNEDLKRVVERVEEELKRRG

SEQ ID NO: 14464 - protein, 56 aa, Artificial Sequence
  Synthetic
TDELRKDVDRLVKRLKKLVDDLRRKSKETADRLRELVKRSRELSRTLAEELRKKTE

SEQ ID NO: 14465 - protein, 59 aa, Artificial Sequence
  Synthetic
SEDEEAKKRVEDLVRELKKSNDELRRKSEESLRRLKELNDELRKRVRDLEDRLRKLVED

SEQ ID NO: 14466 - protein, 55 aa, Artificial Sequence
  Synthetic
ERIIEELDKELKKSSEETDEIVKRDEDVLRRSDEESRRIIKKLEDVLRRADERVK

SEQ ID NO: 14467 - protein, 60 aa, Artificial Sequence
  Synthetic
SKDEEAKKRVEELTRKLEETVREDKKRIEDLAEKLKKVVDKLRRDSERTRKKLEEVERKG

SEQ ID NO: 14468 - protein, 55 aa, Artificial Sequence
  Synthetic
ERILRELEKVLREVKKKHKETLRTLEELLREVAKRAEDINEEDRKVLEDVVRKLT

SEQ ID NO: 14469 - protein, 61 aa, Artificial Sequence
  Synthetic
SEVEEILEDIRRRMTRVEERLRKSNKELEDAIREVTKRLKKSLDDLKKIIEEVKDVADKKG

SEQ ID NO: 14470 - protein, 56 aa, Artificial Sequence
  Synthetic
AEELRKMVEDLTKELEDLVEEDKERVKRWRDELEEIVKRDRDKVERWREEAEKIKK

SEQ ID NO: 14471 - protein, 61 aa, Artificial Sequence
  Synthetic
SELEEILRDVERLVRKVKTDLDDSLRRLKEVIDDVERLLRESNEKLRRVIKDVEDLADKKG

SEQ ID NO: 14472 - protein, 56 aa, Artificial Sequence
  Synthetic
EEALKKLVEDLRKRLREVVEEDKEKVRRWTEKAKRIVEDDKRRVEEWERKLEETVR

SEQ ID NO: 14473 - protein, 62 aa, Artificial Sequence
  Synthetic
DEVERVLDDVRRKLEKVRRDLRRIDEDLRRVVETVKRLLDESNKDLERAVRKVKDELDKKVR

SEQ ID NO: 14474 - protein, 56 aa, Artificial Sequence
  Synthetic
EEELRRVVKELKEDLERLVRELEETVREVKEELEKVVRDDEKLVEEWKKRLEERSR

SEQ ID NO: 14475 - protein, 61 aa, Artificial Sequence
  Synthetic
EEVERVLDDIRRVVEEVKRRLDEIDKKLTEENERVKEELDRIDDRLRKLVEEVKRRLDEKV

SEQ ID NO: 14476 - protein, 56 aa, Artificial Sequence
  Synthetic
REELEKVVEDIKRKLEKAVRDLEKTVKENKDRNDDIVRRVKKTVDDAEERLRRAVK

SEQ ID NO: 14477 - protein, 61 aa, Artificial Sequence
  Synthetic
KEVEDILRELRRAVEEHRRRSEELLRRMRKLVKDLEDRIREILERARRSVKEIKDRIEKDG

SEQ ID NO: 14478 - protein, 56 aa, Artificial Sequence
  Synthetic
EEVLKEVKKLLDEVRKRSKDIVDEVRKLLEEVLKEAERVLREWKKLNDEVEDRLRQ

SEQ ID NO: 14479 - protein, 61 aa, Artificial Sequence
  Synthetic
SEVEEVLKEVRKLIEDWRANSERILRRIERAIRELRRKIREWLERSKKKIKRLEEVIDKEV

SEQ ID NO: 14480 - protein, 56 aa, Artificial Sequence
  Synthetic
EDVLREARKRVDELEKRSREVAKRARDLLKEVRDKIKEVADRSRDLLRKVEEAIEK

SEQ ID NO: 14481 - protein, 60 aa, Artificial Sequence
  Synthetic
SAEEVDRRVEELLKELERRSEEVLETWKELNKKLNKDAKDVTDEVRELLKELAELIKRDG

SEQ ID NO: 14482 - protein, 59 aa, Artificial Sequence
  Synthetic
EEVVRRLLEDLRRLIDEWRKRSKEVEEEVRKSIEDIKRRIEEILRRIRKLIEEIRRRIK

SEQ ID NO: 14483 - protein, 59 aa, Artificial Sequence
  Synthetic
DEDERVKDLLRRVKKTVDELLEELKREVKKSREEAKRLLKELEDRLRRSRKEAEKLRSS

SEQ ID NO: 14484 - protein, 56 aa, Artificial Sequence
  Synthetic
REVLEEAKKILDDARRAIEEIIREWEEVNKEVDDRIDRIVEEWRKVNDKVNKDLTT

SEQ ID NO: 14485 - protein, 61 aa, Artificial Sequence
  Synthetic
SEEEKIVEDLRREVKRLAERVKELIETSKKLVEDSKRHVKDLARRLRDIIRKLKKDLRDKG

SEQ ID NO: 14486 - protein, 55 aa, Artificial Sequence
  Synthetic
RRALEELEKVVREIRRELERVHEETRRVIEESNRELEEILREAKELLEEVKKEAE

SEQ ID NO: 14487 - protein, 64 aa, Artificial Sequence
  Synthetic
RELEKALEEAKRLLDKVRKELKKIHEESRRLLKETRDETRRVLEEAERLLREIKKLIDRLREDR

SEQ ID NO: 14488 - protein, 59 aa, Artificial Sequence
  Synthetic
EEDVRRLVEELRDLIRELERKVKEVVETSRRLAEKDKEDNKRILEELRRLIRELEEDVR

SEQ ID NO: 14489 - protein, 60 aa, Artificial Sequence
  Synthetic
EEIERVEKLVEEVVRRAEDELRRSAEHVDRVVERAERLVERSREHSKDLMRRLEEVLRRG

SEQ ID NO: 14490 - protein, 59 aa, Artificial Sequence
  Synthetic
EDKAREIIERLRDVLRKIEEALERISRKLKEVLRRVEKKLEEDSRTLTRVVEEAKKKLD

SEQ ID NO: 14491 - protein, 60 aa, Artificial Sequence
  Synthetic
KEIEELDEEVRRLVEELKRLSDESRKHSKRLVEELKKLLEDSKRHSEELARRARKVLREG

SEQ ID NO: 14492 - protein, 59 aa, Artificial Sequence
  Synthetic
REDAERIIKKLEDVMKRAEETNRRDIKKLEDVLKDVEDKLREDSKRLREVLEEVKKRLE

SEQ ID NO: 14493 - protein, 59 aa, Artificial Sequence
  Synthetic
SEVEEILRDIERASEESKKTLDRILKKIEDASRRSKELSDKSLKEIRDAMEEIKKELDK

SEQ ID NO: 14494 - protein, 56 aa, Artificial Sequence
  Synthetic
SEELDRRVKELVRKSEEELKDLDREVKELVRRSEELLEDDKRLVKEVVDEARERRR

SEQ ID NO: 14495 - protein, 57 aa, Artificial Sequence
  Synthetic
DELEDVKRRVDEIVRELERLNEKLRRDVEEIVKRLKELNKRLLEEVRRTAEELKTKN

SEQ ID NO: 14496 - protein, 58 aa, Artificial Sequence
  Synthetic
EELREILKELKRVLDESRKLSKEIEEELERVLRDSERATEEILRELEKIIEEVERKVR

SEQ ID NO: 14497 - protein, 57 aa, Artificial Sequence
  Synthetic
DELEEVRKRVERIMEELKRHLEKIAKDSKKSVDELKKHLEDADRKSEESVRKLERDN

SEQ ID NO: 14498 - protein, 58 aa, Artificial Sequence
  Synthetic
RELEDILRRLEEVSERHRRSIEEILRRNEEASRRHRESIRRILEKNRRVLERVERKVE

SEQ ID NO: 14499 - protein, 60 aa, Artificial Sequence
  Synthetic
EEDERAKERVKRVVEENDKVNEDVEREVRKVVKENEDVLEEIKRTVDKIVEDLERLVREG

SEQ ID NO: 14500 - protein, 55 aa, Artificial Sequence
  Synthetic
ERILKELEDANEKSKKRSREILERLREANERIEETARRILKKLEEVLEEVERRTT

SEQ ID NO: 14501 - protein, 59 aa, Artificial Sequence
  Synthetic
KEREDVKREVEKSVEDLRRHVRDVEEKVRKIKKELEDHVRELKKRVEEIRRRLKDLADR

SEQ ID NO: 14502 - protein, 55 aa, Artificial Sequence
  Synthetic
ESVLEELKRANERHKREIERIRKELEDVSKEHEDRIRRVLEELERVLEEVKRRVD

SEQ ID NO: 14503 - protein, 60 aa, Artificial Sequence
  Synthetic
SEEERAKEEVEKHKRRLEKLVRDAERSSTEHERKLREIVERVKRELDKHEEKLRDIERKG

SEQ ID NO: 14504 - protein, 55 aa, Artificial Sequence
  Synthetic
EEVIREVEKISREVTKLLRDNLKRVEEVTERVERTLDELLERVKEVTKEVKERLR

SEQ ID NO: 14505 - protein, 60 aa, Artificial Sequence
  Synthetic
SERERAEELVRRHEDRLEKLVRELEESSDRHKKRLKRLVEEVRRLIEEHRRRLDEIKKEG

SEQ ID NO: 14506 - protein, 55 aa, Artificial Sequence
  Synthetic
EEVLRKVRTVSTEVKKRLDRNLEEVKKLTEDVTRKLRRLLEEVNKITRDVKREIK

SEQ ID NO: 14507 - protein, 57 aa, Artificial Sequence
  Synthetic
SELDEVRERLKRIVDDLRRRSEEVNKRLEEILREITERLREVNERLADIIRKIREDR

SEQ ID NO: 14508 - protein, 56 aa, Artificial Sequence
  Synthetic
EEVLKKLVEELRKRVEDMARTHDRLVEELKRKADEIVRRHEELVKDLKRKLEEVKT

SEQ ID NO: 14509 - protein, 59 aa, Artificial Sequence
  Synthetic
SEEEKAKELVKELRKEAKKIVDEMRKLVEDHAKLVEELVRDHKRLVDEHRRLIEELKDR

SEQ ID NO: 14510 - protein, 55 aa, Artificial Sequence
  Synthetic
EDVLRELEEIVRDIRKKIDDVIRKLEDISRKARKDSDDVNKRLNELTDDVRRKLT

SEQ ID NO: 14511 - protein, 59 aa, Artificial Sequence
  Synthetic
EEEERARDLVRRLEEIVRRLVKEHEDLVRRHKELVDKLVREHEKLLEDHRKLVEELKDR

SEQ ID NO: 14512 - protein, 55 aa, Artificial Sequence
  Synthetic
EEILERARKIVERLKTESDRVNKRLNEITRELEKRSDEVNTEVRRITKKVTEELK

SEQ ID NO: 14513 - protein, 59 aa, Artificial Sequence
  Synthetic
SEEERADKLVKELKKMAEDIKREMDKLVEELKRTIDELRKKHKELVDRHRRLVEELARR

SEQ ID NO: 14514 - protein, 55 aa, Artificial Sequence
  Synthetic
EEVLKTLKEIVRKIEEEIDRVEKRLRELVKELKDDSDEVNKEVNKITRKVKEELR

SEQ ID NO: 14515 - protein, 56 aa, Artificial Sequence
  Synthetic
RTEEEAERTVEDVARKVKEWREELEEVVKEVRERVKRWKEEMRKLDEDTKKKLDDA

SEQ ID NO: 14516 - protein, 55 aa, Artificial Sequence
  Synthetic
EEVIERIERILKDLHRDSERVLRELKRILDELHRESKESNERNKKLVEDAERRTK

SEQ ID NO: 14517 - protein, 56 aa, Artificial Sequence
  Synthetic
DTEKDAKRTVDDVRRKIREWEERLKKIVEEVKELVRELVERAKRLDEETEREAREA

SEQ ID NO: 14518 - protein, 55 aa, Artificial Sequence
  Synthetic
EEVIKELEDLLRRLHEESKRVLDTLRRILEELRDRVRRSNKRNEEIVKELEDRSR

SEQ ID NO: 14519 - protein, 56 aa, Artificial Sequence
  Synthetic
SEEDKAREVLKRVRDEVEKWRKELERLDEESKKKVDDLVRELEELDKKTDEELRRM

SEQ ID NO: 14520 - protein, 55 aa, Artificial Sequence
  Synthetic
EEILKKIRRILEKLHEDSRRSNETNRRILEELEKRVRESNKRNEDILREVKRKAK

SEQ ID NO: 14521 - protein, 56 aa, Artificial Sequence
  Synthetic
KTEEKVERDVERVKRDVDELIRRAEEVVKRVEDEVRKWIKELKELDDETERLVREA

SEQ ID NO: 14522 - protein, 55 aa, Artificial Sequence
  Synthetic
EEVIKRIKKILDDVRRAVKEVLDRIRRILEKVHEDSRRSNKRNKEILDKVREDTR

SEQ ID NO: 14523 - protein, 56 aa, Artificial Sequence
  Synthetic
SDEERVKEELKRILDEARRLLEESDEKLKRILDELRERLKESDERLKRILDKVRKD

SEQ ID NO: 14524 - protein, 56 aa, Artificial Sequence
  Synthetic
SEELEKEVRELKKRLKKLIDESDKNVKEAEKELRELLRRSEEHVKELKKDADRESK

SEQ ID NO: 14525 - protein, 56 aa, Artificial Sequence
  Synthetic
DDERRVKEKLKRILDESRDMLRRSDERVERSVRTLEDALRRSDEKLERILKKAEDD

SEQ ID NO: 14526 - protein, 56 aa, Artificial Sequence
  Synthetic
SKELDDAVKKNKKESKETVDRSEKNVKELHDRNEELLRRSEKNVDDAKRRLDDTSR

SEQ ID NO: 14527 - protein, 56 aa, Artificial Sequence
  Synthetic
DDEERVKKALDEILDRSRRRLEESDEKLDRSLKTLKKLLEESDRDLERILEKAERD

SEQ ID NO: 14528 - protein, 56 aa, Artificial Sequence
  Synthetic
REELEEAVRRNDEESKKTVDDSRRHVDELHRRNEKLIEESKDHVRRLEEELRKKSK

SEQ ID NO: 14529 - protein, 57 aa, Artificial Sequence
  Synthetic
DEKEELSERVERVIRTAEKLLDEIKRKLEEIHKKANEDLERSLRKLEKVVKEVRDAG

SEQ ID NO: 14530 - protein, 56 aa, Artificial Sequence
  Synthetic
EDELREDVERVKRRLEELIERLRKKVDEVKERHERMLKRSEEHVKELKDEVTEEAK

SEQ ID NO: 14531 - protein, 59 aa, Artificial Sequence
  Synthetic
SEKEELEKEVEDLERRHREELEKLNRKSKKIDEDLKRIIEELNKVSKKIKEDLEREIRK

SEQ ID NO: 14532 - protein, 55 aa, Artificial Sequence
  Synthetic
DEVRKRVEDINREVKEMLERNLRHTEEVIKKADREIEKNERHTREVIREAEERLR

SEQ ID NO: 14533 - protein, 57 aa, Artificial Sequence
  Synthetic
SEVEEVDKKLETSHRDIEKRIREVLRELEESSRKLKRDVDEVLKKLEESHRRIAESL

SEQ ID NO: 14534 - protein, 56 aa, Artificial Sequence
  Synthetic
SKRLEELVKEHKRTLEEVKRRLEELVKKHRKDLEDLVREAEELVERHKRKLDETEK

SEQ ID NO: 14535 - protein, 57 aa, Artificial Sequence
  Synthetic
SEVEEVDKEVERILDEARKALKRVEERVRKSHEDIRREIKRVEEDLERSSREIREKL

SEQ ID NO: 14536 - protein, 56 aa, Artificial Sequence
  Synthetic
AEKLKKLVEELEKEIRRLVDELDKLVRKHEEELDRLRKRMDELVKEHKKRLDDTAK

SEQ ID NO: 14537 - protein, 63 aa, Artificial Sequence
  Synthetic
DDEERAKKRVKEAEKEIKDLAKESRDIVEKHRKEVEDVVREMERIVRELAEEAKDVVRKVKDD

SEQ ID NO: 14538 - protein, 54 aa, Artificial Sequence
  Synthetic
EVKDRLRDVLKKAEEMSKEVEDRLRKSSEDLREEVERVEEELKRVLRKIEEDIR

SEQ ID NO: 14539 - protein, 63 aa, Artificial Sequence
  Synthetic
DDRERAKKTVDKVKEDLTRLVRRSEDLVRRHTEKLERVVEELERIVKELEERLKKVVDDVKDR

SEQ ID NO: 14540 - protein, 54 aa, Artificial Sequence
  Synthetic
DVKRTLREILRELEEASREVEERLKESDDRIRERVREVDEKLDRVLEELRKKMT

SEQ ID NO: 14541 - protein, 56 aa, Artificial Sequence
  Synthetic
DELEKVRKELKEILDKLKDVLEESRERTDRLLRKAEEDLRRSDEETERLVKELKDA

SEQ ID NO: 14542 - protein, 56 aa, Artificial Sequence
  Synthetic
KDELKKLVEDLDREVRKIVEELKELNKRIEDELRRIVDEARRSNEKVKELIDRLRK

SEQ ID NO: 14543 - protein, 56 aa, Artificial Sequence
  Synthetic
DEVETVEREADRILKEDEDVLRRSKKITEDILDTLREMLERSERRTEEILKRLEED

SEQ ID NO: 14544 - protein, 56 aa, Artificial Sequence
  Synthetic
KDELKKLVDELKERSKETERELKESNDRLRKKVEDIRRELKRLNDEAEEAVRRLRT

SEQ ID NO: 14545 - protein, 56 aa, Artificial Sequence
  Synthetic
SLIERIEEEIRRVIERVRRLVREIEDSDRKAKEDLERVVREDEETLRRVEKKLKDL

SEQ ID NO: 14546 - protein, 59 aa, Artificial Sequence
  Synthetic
EEEVKKLLEKVKRTARELEKVAEDMLRSNRELVKELLRTLEKSLRDSERTAEKLERAEK

SEQ ID NO: 14547 - protein, 56 aa, Artificial Sequence
  Synthetic
DKEKEISDRLKDVLRKVRDVIEKDKRTNEEARKRVEDLVRKDEETLKRVLEEVRKG

SEQ ID NO: 14548 - protein, 56 aa, Artificial Sequence
  Synthetic
LEDLLRKVEKLAREITERLKESNERSRDLVEKLKREVKKSLRKSERLMEKARETLR

SEQ ID NO: 14549 - protein, 56 aa, Artificial Sequence
  Synthetic
SEREEVKRTLTKAEEEARRLIKRDRDTNTEILKEATERSERDKDKLRKILEEVKKA

SEQ ID NO: 14550 - protein, 55 aa, Artificial Sequence
  Synthetic
KDILDRVRRLVEELRRMIEELNDKSRKLVERLRKLLEDLNRHLEELVKRLRDKAK

SEQ ID NO: 14551 - protein, 56 aa, Artificial Sequence
  Synthetic
SAKEELEDRIRDIVRRVRELITEVKKKNREILKRVEKVIKEVKETNERIEEEVRRG

SEQ ID NO: 14552 - protein, 56 aa, Artificial Sequence
  Synthetic
IDKARKEVEDLVRDAKRVIEELERSLDELVRTLDELVRRLKKSSEDLMRELRKTTE

SEQ ID NO: 14553 - protein, 56 aa, Artificial Sequence
  Synthetic
DEKKEVEKRLKEIEDEVRKMIKEVKETNRRILKKARDLIKKVEDTNKRILEEVRRG

SEQ ID NO: 14554 - protein, 56 aa, Artificial Sequence
  Synthetic
IKKLEDEVRKLKDELRRELERLKRSSTDLARRLEEIIRRLERSSEDLERRLRERER

SEQ ID NO: 14555 - protein, 56 aa, Artificial Sequence
  Synthetic
DEKEEVRKRLTDILRELEDLSRENERSNRRILDRVRELIERVKKTNKDILEEVERG

SEQ ID NO: 14556 - protein, 56 aa, Artificial Sequence
  Synthetic
IDKLRREVEELVRDLRRLIEELSRSSEELVKELEKLLRELEESSKKLAEELRKAVE

SEQ ID NO: 14557 - protein, 60 aa, Artificial Sequence
  Synthetic
SSKERIKEKVDRIEERIREVVKEVEEELRRSTEEARRMVREVKRRLEDSNRKIKKFIDEK

SEQ ID NO: 14558 - protein, 56 aa, Artificial Sequence
  Synthetic
SEELKRLLEDLRRKIEELAKELKKLLEEHKRRVDDVVRRMEELLKRHEELVRRIAK

SEQ ID NO: 14559 - protein, 58 aa, Artificial Sequence
  Synthetic
SEAEEAKKTVEEISERLREALRRSEEETERILRENEKASERHKTEIEKITKELEDKLG

SEQ ID NO: 14560 - protein, 56 aa, Artificial Sequence
  Synthetic
KDELKKVLKEIEDTVRRIVKELEDLNTEAEKASRKSVKELEEHLKRVEERVREEAK

SEQ ID NO: 14561 - protein, 59 aa, Artificial Sequence
  Synthetic
ELKERLEKLLKDWADDSKRMRDELARLLKEWEDRSRKAKRDLEKILEENDDKVKKLDKV

SEQ ID NO: 14562 - protein, 59 aa, Artificial Sequence
  Synthetic
EKVLREVKESAKKISRHSEKVLDEARKELERISEHSRRVLDRVRRESKKIVEDLRERKR

SEQ ID NO: 14563 - protein, 60 aa, Artificial Sequence
  Synthetic
DIERELEEIVRRIKELIRRHKKRLEELVRELEELLRRHREELKKLVKRAAELVEELRRRN

SEQ ID NO: 14564 - protein, 55 aa, Artificial Sequence
  Synthetic
DTVKDMLRKLLEEVKEASDRAREKLTDILRKIKKISEEVKREIDDIRKKIEDTAK

SEQ ID NO: 14565 - protein, 60 aa, Artificial Sequence
  Synthetic
SIEEEAARIVEELRREVEEWERTLREIVERLRRLVEEHKRRLDELVAELKRLVDELRKEN

SEQ ID NO: 14566 - protein, 54 aa, Artificial Sequence
  Synthetic
DIRRKLKEILDELDTITEKLKKELERIKREMKEASRRVREKIDRIRKEIEEVAR

SEQ ID NO: 14567 - protein, 56 aa, Artificial Sequence
  Synthetic
DEIRELLKRIRDVAKRIKDKADRLNEKSRRKVEKLVRDVEKINEDTKRLLDRLRDS

SEQ ID NO: 14568 - protein, 59 aa, Artificial Sequence
  Synthetic
EDVLRELERLLKEIEDLVRELNKTNKKIVDKARKDVKDVHRTNERLLREIERVVREKLK

SEQ ID NO: 14569 - protein, 56 aa, Artificial Sequence
  Synthetic
SEAEELLRRLEKIIEDLERNARALLEKLKEEIRRLDKNLRDLLRRIEKIMRDLTRS

SEQ ID NO: 14570 - protein, 59 aa, Artificial Sequence
  Synthetic
EEVLKEIKRVLEEAEKVSEDLLREIKEVLDRAEELSRRLLKTLEDLLRDIERSVKERED

SEQ ID NO: 14571 - protein, 57 aa, Artificial Sequence
  Synthetic
SSKEKVEELVKEIEEEDRRVLEDTRRLLEEIMRRDEDVLRKTDERIKEIEKELRDRV

SEQ ID NO: 14572 - protein, 56 aa, Artificial Sequence
  Synthetic
SKEAEDRLRDLVRRSREIAKRSRDHLRDLLRESEERVRASLEHVERLVKKLRKDAN

SEQ ID NO: 14573 - protein, 56 aa, Artificial Sequence
  Synthetic
SEAEDLLRRLEEEIRRIKKRHKEVLDELRKLIKEVEDRHKELLDRLREEIRELEER

SEQ ID NO: 14574 - protein, 59 aa, Artificial Sequence
  Synthetic
DRVKEELRRIVKEVRDEIRKANEKIKRLLDEVRERSKDMNRRLKEIVDRVTESLRRKAE

SEQ ID NO: 14575 - protein, 61 aa, Artificial Sequence
  Synthetic
SEVDEALERIKRLIEDLERHVREWLKELREIIEDLRERVRKLLEDLERRIKELEEKARRTG

SEQ ID NO: 14576 - protein, 59 aa, Artificial Sequence
  Synthetic
SKAVEDLERLVEELRKLSEEASRRSRKILEELRETVERVIKRLKELLKKLKEVVDELRR

SEQ ID NO: 14577 - protein, 61 aa, Artificial Sequence
  Synthetic
DRAEKVLEDIRKLIEEMRKHAEEWERRAREAVKELRKEVTDWRRRLRKLLEDLEEKVRREG

SEQ ID NO: 14578 - protein, 59 aa, Artificial Sequence
  Synthetic
SEVVRRLEKLVEDLRKINEDVNRRSRELVETLRDDVRKVNEESKRILEEVKKILDDSKR

SEQ ID NO: 14579 - protein, 59 aa, Artificial Sequence
  Synthetic
DLRRELRRVLEESKKHVKELVRELDEDLTRWERRVEELVKRLRDVLRKLEKEVDELEKK

SEQ ID NO: 14580 - protein, 58 aa, Artificial Sequence
  Synthetic
RVKEELRELVRESDKIAEEIIEKLDRDVKKVKKDHERIDEELKRKLKEVEERVERIRT

SEQ ID NO: 14581 - protein, 61 aa, Artificial Sequence
  Synthetic
SEVEETLREIKEDIKRSKKEWDDLLKTIKELIEDSKRKWDKLLRDVEELIRELLERLRRDG

SEQ ID NO: 14582 - protein, 59 aa, Artificial Sequence
  Synthetic
DRAERDVERIIREAKKLTDKVREDVERLREEWERLVREVKERIKRLLEDLRRLVEETRR

SEQ ID NO: 14583 - protein, 61 aa, Artificial Sequence
  Synthetic
DEAERLLEEAERIIEKSREEWERLLERIKRLIETLRKRYEDDLRESEKRIEELLRKARRDG

SEQ ID NO: 14584 - protein, 59 aa, Artificial Sequence
  Synthetic
DRVAREVERILRELKKLTDDMKKRAKELIDELKRLSEEMHRRIEKSNEDLKRLVDDVDR

SEQ ID NO: 14585 - protein, 61 aa, Artificial Sequence
  Synthetic
DEAEDILRRIRELIERSKRKWDELLREIKKLIEESRREWEELLRRIREIIERLKRLAERDV

SEQ ID NO: 14586 - protein, 59 aa, Artificial Sequence
  Synthetic
ERVKEEMKRLIEDLKRVSEEVKRELDKLIEELKEVSERASKRLKELIDDLDRLVKEVEK

SEQ ID NO: 14587 - protein, 59 aa, Artificial Sequence
  Synthetic
SEDEKAIEELKKEIERLRRLLEELRKHVRRLIEEIKRLVEESKRHVEELIREIDDLRRR

SEQ ID NO: 14588 - protein, 55 aa, Artificial Sequence
  Synthetic
KEVTDIIRELKEVLDEIKRTSEELLRTIEEIVRDAERKNRELLKELKKVLDEVEK

SEQ ID NO: 14589 - protein, 58 aa, Artificial Sequence
  Synthetic
DEDEELIKRLRDRIREIRKLVEDSARNVKRLIDEDERLARRSLRHLEETLKEIERKAR

SEQ ID NO: 14590 - protein, 55 aa, Artificial Sequence
  Synthetic
DEVREVLKEIRELVKELKERNDELLTRWKESIKRVEEEDERILREIERRVEEVER

SEQ ID NO: 14591 - protein, 60 aa, Artificial Sequence
  Synthetic
RAEEEVKRLLKEDNETLKRIEDDVRRLLRKNNESIREAEKTNRELVKRVEDIIRRARERG

SEQ ID NO: 14592 - protein, 56 aa, Artificial Sequence
  Synthetic
LEELLERIKELNERTKKKVADLRRVAKRLDEETERKVRETERRWRDVLDKVRKKVK

SEQ ID NO: 14593 - protein, 55 aa, Artificial Sequence
  Synthetic
REVEEVLERLKELLREHEKHAKEVEDRLRELIRENKEHAREMLERLEKILDELKK

SEQ ID NO: 14594 - protein, 59 aa, Artificial Sequence
  Synthetic
EEALRELRRLLDEIRRVNRKVEERIKEVLKKIDEDNKEVVRRLEEALEKIREVIERTAT

SEQ ID NO: 14595 - protein, 59 aa, Artificial Sequence
  Synthetic
KAKEDVKRALDEWKEVNDRVNEELKKAIDTWREVNRKVKEDVDRLVKEIEELIRRVREN

SEQ ID NO: 14596 - protein, 56 aa, Artificial Sequence
  Synthetic
REDVKRELKRVIEETRERAKRLLEDLRRLIEETKKLAEELLARAKEIIDRIREAAR

SEQ ID NO: 14597 - protein, 61 aa, Artificial Sequence
  Synthetic
RAEEELDRLSREVEKVSKKAREDLEEMRKALEDVSRRVKEKLRRILEEIKEAIKDVKRRTN

SEQ ID NO: 14598 - protein, 56 aa, Artificial Sequence
  Synthetic
RELIREVEKLIEDHRRRLEEIVETVRRLVDEHRRRLERIVREAAKLVKDIKRELEK

SEQ ID NO: 14599 - protein, 61 aa, Artificial Sequence
  Synthetic
SVKEKLRRISKELEKASRDDERENRRILKEARDVIREAADKIRRIEEELRKIIDRVRKETN

SEQ ID NO: 14600 - protein, 56 aa, Artificial Sequence
  Synthetic
EEIIEEVKRLVDEHKKRLDENVKRLKELVDRLRETLERLVDRLRKLVETLKRESDR

SEQ ID NO: 14601 - protein, 61 aa, Artificial Sequence
  Synthetic
KVEEDLKRIKKEIKDAADEDREKNREIMKRLNDVTREVEERLRKILEDLERLVRRVKEEVN

SEQ ID NO: 14602 - protein, 56 aa, Artificial Sequence
  Synthetic
EELIKRVKELVREAKERLKDNVRRLEELVKEWKRKLKEIVDRVRELVKDLERRLKE

SEQ ID NO: 14603 - protein, 61 aa, Artificial Sequence
  Synthetic
SEKEKIVKDVEELIREAEELVRRLLKRLKELNDESEKTARDLVRKNEETLKELKDVVDRRV

SEQ ID NO: 14604 - protein, 55 aa, Artificial Sequence
  Synthetic
RELDELIKKLDEVLRRAEKEAEELIRDHRRISREVKERIKDLNRRIERILREAEK

SEQ ID NO: 14605 - protein, 61 aa, Artificial Sequence
  Synthetic
SLEEIVKRVEEDIRRIIEELRRRIEEADRKIAEIIDRLRKTVEKVNKEIEDLIRELKKKEG

SEQ ID NO: 14606 - protein, 56 aa, Artificial Sequence
  Synthetic
DKRVRELVEEVKKKLRDLVEEVRESVKRLEDTLRRVEEEIRTTARELLRRLREELE

SEQ ID NO: 14607 - protein, 59 aa, Artificial Sequence
  Synthetic
SLEEEVRETVKRLRKEVEDWLREVEKVLEDLLRELKKSIEETKKVAKELEDKLRDVKRR

SEQ ID NO: 14608 - protein, 59 aa, Artificial Sequence
  Synthetic
ERIRRTLEKAREEVKRLSAETKRLIEEVKRRLDELLKRDNDIIDDARRRVKKVLDEIET

SEQ ID NO: 14609 - protein, 59 aa, Artificial Sequence
  Synthetic
DLEEELRKVVEDLERKLRESIRETEEVMRRLEESVEESIRKTEEVVKRLREKLEDVKRR

SEQ ID NO: 14610 - protein, 59 aa, Artificial Sequence
  Synthetic
DEIRDTVRKAKEDVERLLEEDNRRIKEVLDRVAKLNKRDNETIERAEEEARKVLREIEK

SEQ ID NO: 14611 - protein, 59 aa, Artificial Sequence
  Synthetic
DIEEEIREEVERLRRTLKELADRIKKLVDELREKLRRWLEEVEEVLRRLIEDLRRVKEE

SEQ ID NO: 14612 - protein, 59 aa, Artificial Sequence
  Synthetic
EELEKRVREAEEEVRRVNKKLKDDLDKAREDLKEFSDRTRRMIKAVERDVKRVLDEIRR

SEQ ID NO: 14613 - protein, 58 aa, Artificial Sequence
  Synthetic
SVEETIKRILEEVEELIREVKERNERIERRAERLIEEVKRSNDEIKKEVRTAIEKVIR

SEQ ID NO: 14614 - protein, 56 aa, Artificial Sequence
  Synthetic
KEKVDKLVKDLRRVIEELRKSLEDLERRLDDILRRLKESSDELVRELRRLLKEMEK

SEQ ID NO: 14615 - protein, 60 aa, Artificial Sequence
  Synthetic
SVEEALDEIEKKVEEMIREVKETNDRVRRKVKELSEKSKTENERVVREARELIREVERER

SEQ ID NO: 14616 - protein, 56 aa, Artificial Sequence
  Synthetic
KKDVDDLDRDLEKKLRDLKDSSRKLVKRVEDLVRESEDTVRKLIERLERLIRETKR

SEQ ID NO: 14617 - protein, 58 aa, Artificial Sequence
  Synthetic
KVEEELDKILKEVEDLVRRDEEEIKRILEEVKELIRKVKETNDKVEREMRKLVEEVKK

SEQ ID NO: 14618 - protein, 56 aa, Artificial Sequence
  Synthetic
EDSVRELVKRLRERAEESKKRTKDLEDKIRTKIEELERSSKELTDELRTLIREAER

SEQ ID NO: 14619 - protein, 59 aa, Artificial Sequence
  Synthetic
SVEEAIKEILRELEKVNEDSKRLSDRNLKELEKALRDAKKSVEEILRELEKALDEVRKN

SEQ ID NO: 14620 - protein, 60 aa, Artificial Sequence
  Synthetic
REDVERILKEIKDEVDRVRKENERVNRESEDESRKLVEELKKVLRRLKEEVRRIVEELRT

SEQ ID NO: 14621 - protein, 61 aa, Artificial Sequence
  Synthetic
EVEERLEEILRRLERAVEDWKRKNEKILKELRDVVRESKKRTREIEKKIEDAARDVLREVN

SEQ ID NO: 14622 - protein, 56 aa, Artificial Sequence
  Synthetic
KEVVKELEKDVRRIVEELKDSLRRLKEKVEEVARTVKKLNEELDDSVREIVERLRK

SEQ ID NO: 14623 - protein, 61 aa, Artificial Sequence
  Synthetic
NVEEELDRIRREAEKVVKESRELTREILERAREAVEKSEEDTRRILERLERVVKRVKKDVN

SEQ ID NO: 14624 - protein, 56 aa, Artificial Sequence
  Synthetic
EEVLDELRKKVKKLVDELRTEDRRLEEEVKKIVRDAEKRNKELEDEIRRLAEELEK

SEQ ID NO: 14625 - protein, 60 aa, Artificial Sequence
  Synthetic
SETETAVKKLKKLVDDLKREVERLVERLRELVRENSEKSRELVKRSDDLVRELLEKVKRR

SEQ ID NO: 14626 - protein, 56 aa, Artificial Sequence
  Synthetic
SELVKTVEEELKKVLEEVDRLVRKILEDLRRSLEESKRLSEESKKKLEDVLDRARR

SEQ ID NO: 14627 - protein, 60 aa, Artificial Sequence
  Synthetic
RELEEAVKKLKKKVEDNTRTSRKLVTDLEREVEELKKEVEEVVRKSKELVRELKKKVDRR

SEQ ID NO: 14628 - protein, 56 aa, Artificial Sequence
  Synthetic
SELVERVKEELKRSLEESDKLVEDVRRKLKEVLDDIRRLSEESKRELRDVLREADK

SEQ ID NO: 14629 - protein, 60 aa, Artificial Sequence
  Synthetic
ELEEIVKDARRRIKELIDEARRTSEEVVERIKELLKRAEEISREARKRLTELLEELKKTV

SEQ ID NO: 14630 - protein, 56 aa, Artificial Sequence
  Synthetic
KEELRKIVEDILRTIKKLLEELRDDARRLLEEIKRLLEELERHVRKLLKEIDERIK

SEQ ID NO: 14631 - protein, 60 aa, Artificial Sequence
  Synthetic
ELEEIARKAKEDIERLVEEARRISEEVKRELTELVERLRRISEEVRKRIEDLADELRKKV

SEQ ID NO: 14632 - protein, 56 aa, Artificial Sequence
  Synthetic
KKTLKEKVEDILRRIRELLRELRENARELVKEIERLIRELEKDAKRILKKIEDAIR

SEQ ID NO: 14633 - protein, 60 aa, Artificial Sequence
  Synthetic
SVEELVKEIEKRLDELVREIEKTNKKVEDDIRKMLEDIKRVHDKSNEDLEKLVKELREKL

SEQ ID NO: 14634 - protein, 56 aa, Artificial Sequence
  Synthetic
LKDIEKVARDILRRVKKILEENRKHAEKARRELEKLLRESKRLVDELLRRAEEEKR

SEQ ID NO: 14635 - protein, 60 aa, Artificial Sequence
  Synthetic
SREDRARELVKRILDEHKKILEDVEELAKELLRRHEELLKTLRELMRRIEEDLKRLEDED

SEQ ID NO: 14636 - protein, 56 aa, Artificial Sequence
  Synthetic
SEILKTVTRLSEELNRRIREVVRKVEEDLEDLNRRLKKIADEIEERIKEILRRIEK

SEQ ID NO: 14637 - protein, 60 aa, Artificial Sequence
  Synthetic
SIEDVVRRIREEDRRLHEEIRKVVDEIRKRLEDALRSHEERVREVLERIKKLLEELKRRG

SEQ ID NO: 14638 - protein, 56 aa, Artificial Sequence
  Synthetic
EKDLRKKLREIEEKNERLLRELERLLEEIRRTLEDLNRKLDEEIKKLERRLKERDR

SEQ ID NO: 14639 - protein, 58 aa, Artificial Sequence
  Synthetic
SLKELIDEVERRLREVNRRARELVEEVKERLRRVNEESRELLREIEERLEDVLRELEE

SEQ ID NO: 14640 - protein, 59 aa, Artificial Sequence
  Synthetic
EEEIKELVKRARELVKRSKEHVDELMETAKRLVDESRKHAEELFRELKKLIEELREKIR

SEQ ID NO: 14641 - protein, 60 aa, Artificial Sequence
  Synthetic
SEVEKLVEDLRREVKRHSEKVERLVKELRDDLERWKERLEEIMRRLEKLVRDLEELLRRG

SEQ ID NO: 14642 - protein, 56 aa, Artificial Sequence
  Synthetic
EELVREVKERLERSRERVDKLLRDNHKRLKEVLDEAKKLIDRVRKLLRRVLEEAKK

SEQ ID NO: 14643 - protein, 60 aa, Artificial Sequence
  Synthetic
SDVERLITELADSVRDHSRDVRRVVEELEKLLRDWERDIEDIVEKLDRLVRTLEELLRRG

SEQ ID NO: 14644 - protein, 56 aa, Artificial Sequence
  Synthetic
EDLVRTVEKLNTESLDEVRKLVKKNHEDLKRVLDKAKKLIEEVRKKLEEVLDEARK

SEQ ID NO: 14645 - protein, 59 aa, Artificial Sequence
  Synthetic
TLEEILKEVAERVKKANEDSRRILEKVKRDVETVNRENEKILKKAAEDVKRVLDEARKR

SEQ ID NO: 14646 - protein, 56 aa, Artificial Sequence
  Synthetic
EKELREMIEKLKRDNERMLRELERRIEELKRDNDRVNEESKRLVDELKRDAEEKLK

SEQ ID NO: 14647 - protein, 59 aa, Artificial Sequence
  Synthetic
TLEEILREVEKRVKEANERNRKISEELADLVRRVNEENKKILEDVAEEVRRALERARRR

SEQ ID NO: 14648 - protein, 56 aa, Artificial Sequence
  Synthetic
EEELRRMIEELEKRNRDVDRESKKLAEELEKTNRDVNRKSRELVRRLRRKLEEELR

SEQ ID NO: 14649 - protein, 59 aa, Artificial Sequence
  Synthetic
ELEDILREVRKRVEDVNRRNKEILERVAEEVRRLNEENKRILEEARKRVEKVLEDLKRR

SEQ ID NO: 14650 - protein, 56 aa, Artificial Sequence
  Synthetic
EEELRRAIKELKDRNEDVDRRTKELIKRLEDKNRELNRESRERVEELKKRAEELAR

SEQ ID NO: 14651 - protein, 59 aa, Artificial Sequence
  Synthetic
DLEEILKDVKRRVEEANRRNEKILEEAKEKVDRVNRSNEKILEEVKETVKEVLRRAREE

SEQ ID NO: 14652 - protein, 56 aa, Artificial Sequence
  Synthetic
EEELKEMIRRLEETNRRVDKETRKLIEELERRNREVDRESERLIRELKKKAKDDLD

SEQ ID NO: 14653 - protein, 59 aa, Artificial Sequence
  Synthetic
TLEDILREIAKVVKEANKRNKRILEKVARDVEEVNKENKKILDEVKRDVERVLREAEKR

SEQ ID NO: 14654 - protein, 56 aa, Artificial Sequence
  Synthetic
EDELRRMLEELERTLREVDRESDELVKKLKRDAERVNEETRRLIKELKEIADRLLD

SEQ ID NO: 14655 - protein, 60 aa, Artificial Sequence
  Synthetic
SIEELVREIEKTNEDMRREIERLSDENRRRLDKALEDIERRAREIKEKLERVMKRLREKG

SEQ ID NO: 14656 - protein, 60 aa, Artificial Sequence
  Synthetic
EKRVLDELRKLLEDSKDELRRLLEELRRHIKETDDTVRELLDRIRKIREELDDEVRRLEK

SEQ ID NO: 14657 - protein, 60 aa, Artificial Sequence
  Synthetic
KEEEDARRALKRVEEEVRRNKEEMRKLLEDNEKRIRENKKRAEDSSRKVKKRIDELRRDG

SEQ ID NO: 14658 - protein, 55 aa, Artificial Sequence
  Synthetic
EEVLREIEKILRDLERDHRRVLEEIRKRNDELRETHERVLRENEKILEKVERELR

SEQ ID NO: 14659 - protein, 56 aa, Artificial Sequence
  Synthetic
SVDDKVRRRIREIKEELERVLTRSERESDDIKRELEEVLKRSEERTKKIKDDAERG

SEQ ID NO: 14660 - protein, 60 aa, Artificial Sequence
  Synthetic
DERVMRDLERELEKLERKVREIKRELEEHNARLREKVRRIDEDLKRDNKELEDTIREDTR

SEQ ID NO: 14661 - protein, 59 aa, Artificial Sequence
  Synthetic
KEEEELEERIRRLEKLVEDYKRELDRSIKELEDEVDRARRELEKSIEEMKKKVKKAEDD

SEQ ID NO: 14662 - protein, 59 aa, Artificial Sequence
  Synthetic
DRVIRKIKKLLDEVRERLERINRTHRELLKEVEERLKKILKDITDANRRIEERLEEITR

SEQ ID NO: 14663 - protein, 60 aa, Artificial Sequence
  Synthetic
SLKEELKRINDENKEELDRLREELKKLLKEVEEELRRAAEELERINRRIKEELDKVADRV

SEQ ID NO: 14664 - protein, 59 aa, Artificial Sequence
  Synthetic
EEVAERLLEELREDVKRTKEKMKEMLDRVKKKIDDIKRKLEKLLRDNERRIEELKRDAD

SEQ ID NO: 14665 - protein, 58 aa, Artificial Sequence
  Synthetic
SVEEKLKKALEESKRKSKRIKDDDERANREVKKRIEDIVRRLEEVLRKVLKDVTKDIK

SEQ ID NO: 14666 - protein, 56 aa, Artificial Sequence
  Synthetic
EDEVTRDVKRLEDHNTRLEKKVKESVERLKEKLEELRKRVEKIERDLEKLLEDVRT

SEQ ID NO: 14667 - protein, 60 aa, Artificial Sequence
  Synthetic
KAEDVLRRVKEEHERIRREIKRVIDDVRRKHKEILDRLREEIKRVEELLRKILEDVERDG

SEQ ID NO: 14668 - protein, 56 aa, Artificial Sequence
  Synthetic
EEVVKELEDNVKRNEEDAKRTVEKLRKNLEDNRREVEKIVRDLRRLVEKAREDVKR

SEQ ID NO: 14669 - protein, 56 aa, Artificial Sequence
  Synthetic
DLKEILDEARKLIEDLRKKAEEILEESKRLLDDLKRKADEILTRYDELTKRLSTKV

SEQ ID NO: 14670 - protein, 56 aa, Artificial Sequence
  Synthetic
LEELKKRLEELIREVEKDLRRIKKESEDRVEEIERRLRRIAEELDKDVRRVEEEAK

SEQ ID NO: 14671 - protein, 63 aa, Artificial Sequence
  Synthetic
SKEETVARRVDEIARELEEKNKKWEDDSRKAVDELRRKLEEWEKRSRDLREKVKDLLRKLKDQ

SEQ ID NO: 14672 - protein, 55 aa, Artificial Sequence
  Synthetic
EELKKKVEKLLEDHRKKSEELLRKDEKLIRDMEREVERLLREDEKVIEDVERATK

SEQ ID NO: 14673 - protein, 63 aa, Artificial Sequence
  Synthetic
SKEETVERDVERIVRRLRELNKEWKKRSEEVKREVDESDKRTAEAVKKLVRDLEETLKDLKDR

SEQ ID NO: 14674 - protein, 55 aa, Artificial Sequence
  Synthetic
EEIKKKLEKLLKEHEDLSRKLLKEDEEEIDRHRRKVREWAEDLRKKLEEAERAST

SEQ ID NO: 14675 - protein, 60 aa, Artificial Sequence
  Synthetic
SEKERAEEELKRIEDELREAIKRSEDRLRRIEKELRDREKRSEEELRRLEEELRRLAEER

SEQ ID NO: 14676 - protein, 55 aa, Artificial Sequence
  Synthetic
RKIIEDLKRLLREFERAVEESNERLRRLLEEFKEKVKESNKRSRELLRRMEEEVR

SEQ ID NO: 14677 - protein, 57 aa, Artificial Sequence
  Synthetic
DDLERLEKEAREILERHKRALDELEKRLRRVLEKHEEDLRRLEETLRELLKKVRKDG

SEQ ID NO: 14678 - protein, 56 aa, Artificial Sequence
  Synthetic
REELEKEVRKLEKKSRDDIRRLEKELRELEKRSRDNIRELEKRVRRVARELDKTAK

SEQ ID NO: 14679 - protein, 59 aa, Artificial Sequence
  Synthetic
DEKEEAEKALREIKKRIEDNVREVRRLNRELREKLRKLIEDYDRLLKELEKRVEDIVRK

SEQ ID NO: 14680 - protein, 56 aa, Artificial Sequence
  Synthetic
ERDLRREEKKLRDELRDLHREHRKSIEDLDREIKKMEDELRRSIEENRKRVEELEK

SEQ ID NO: 14681 - protein, 56 aa, Artificial Sequence
  Synthetic
REKERVKRVVRRVEEELKRNLEEVEEESRRDLRRLEENLERVEEAVRRILKRLDDS

SEQ ID NO: 14682 - protein, 56 aa, Artificial Sequence
  Synthetic
REELEKLIEKIERELKKTHDDSRREIERLRRETKKLHEKSEELIRELEKRLRDAER

SEQ ID NO: 14683 - protein, 60 aa, Artificial Sequence
  Synthetic
SEVEEILDRIRRELERLAREARKTVERNKKELDRIREEVDRSLRRNKEELDRLRREKKDV

SEQ ID NO: 14684 - protein, 59 aa, Artificial Sequence
  Synthetic
EDARRAARELLKRLEDLLREHHDRLRKSDEEIRKLIEDHHRALEESNREIKELIDRMAK

SEQ ID NO: 14685 - protein, 60 aa, Artificial Sequence
  Synthetic
DEAEKLIKDIEDKDEELKEKARELKEKLEERDERTKKLIEELKREADRTLEELKKKVEKA

SEQ ID NO: 14686 - protein, 58 aa, Artificial Sequence
  Synthetic
EVVKRVRDLLKRHEDLTREIKKEVKKMNEKNRELVRRVEETLKKLLEDLKRLLDESRK

SEQ ID NO: 14687 - protein, 60 aa, Artificial Sequence
  Synthetic
SEEEEKVKDIERKLRKHNKEVKDTERENEKRLRELRRTVEEDRKDAERELERIKRVVERG

SEQ ID NO: 14688 - protein, 55 aa, Artificial Sequence
  Synthetic
EELDRLEKELRESIRRAEELLKDSKRRADELIERIKDVLRKVKEKIEKLIEDTRR

SEQ ID NO: 14689 - protein, 57 aa, Artificial Sequence
  Synthetic
SEKEVVEELKKTVDDLKRKSEEAIKKAKEAVDKIRRDSERAIRKNEDTLRKIEEEIK

SEQ ID NO: 14690 - protein, 56 aa, Artificial Sequence
  Synthetic
EDILREIAKRIKDLIEDHKRASKEIERDIRKILEDHKRAAEKIRRDLRRLLEDVER

SEQ ID NO: 14691 - protein, 60 aa, Artificial Sequence
  Synthetic
SLEKMVTDIIRKLEEIARRHKTRSDEIVRRLEEIIKTHEKRSKELMDDLKRLVDEVRKKK

SEQ ID NO: 14692 - protein, 56 aa, Artificial Sequence
  Synthetic
EEDIRRLDEEVKDLERRSREEEERLEREVRELEKRSEETIRRVEKKVRDLADELRK

SEQ ID NO: 14693 - protein, 59 aa, Artificial Sequence
  Synthetic
SEEDVVKKVRKKLEDVHRDTRREIRRLEEETKKLHDETRKTIETIERRLRDLRDRLTKE

SEQ ID NO: 14694 - protein, 56 aa, Artificial Sequence
  Synthetic
SEEVRDVKEKLKRNLEEARKASREDLERLKRNLEKADEDVRRLLEELKRLLDEVRR

SEQ ID NO: 14695 - protein, 60 aa, Artificial Sequence
  Synthetic
SLEEAIEDLRRKLEKLLKDYADLSKEIEDKLRKIHEDSRRLVEKLEEEARRILKEVRERG

SEQ ID NO: 14696 - protein, 60 aa, Artificial Sequence
  Synthetic
EEEVRKEIEDADKRVKDLKRELERDIDELRKRVEELRRRHEEKIKKVAEDVKRREDEARK

SEQ ID NO: 14697 - protein, 61 aa, Artificial Sequence
  Synthetic
SRLEKIKRELDKKLKDHEDDSRDKVRKLRESLKRHEDKSRKEEEEVKKTLKELEDKLRRDG

SEQ ID NO: 14698 - protein, 56 aa, Artificial Sequence
  Synthetic
KRLVDDAKRKIKELEEENERLVKEVEDRNRELDERNKRIIDRIRRLNERVKEEAEK

SEQ ID NO: 14699 - protein, 57 aa, Artificial Sequence
  Synthetic
DEVETVIERDKKLLEDWVDRARKVVKRDEDSLRRDEEENRRVVEENSRTVKELKERI

SEQ ID NO: 14700 - protein, 58 aa, Artificial Sequence
  Synthetic
EVVKRVEEEVKRLNERADELLKRVEKRAEELNEESRRLSEEVERKVRELNREADERVK

SEQ ID NO: 14701 - protein, 57 aa, Artificial Sequence
  Synthetic
SEVEEVVKRNSDTAKEDMDRNEKVVEDNSKRLREWEKAIEEVEKEVDKAMKDLKRRI

SEQ ID NO: 14702 - protein, 58 aa, Artificial Sequence
  Synthetic
KLVEDVRREVEKLNRESEERSKRVKEEVDDLNRKLEKLLRDVKEEVKKLLEEAERETK

SEQ ID NO: 14703 - protein, 57 aa, Artificial Sequence
  Synthetic
DEVRKVVEDNERSVREIKEELKRVVEEDKELVDRWRERLEKVVKDNERSAKKIKDDV

SEQ ID NO: 14704 - protein, 59 aa, Artificial Sequence
  Synthetic
DEMLRRIEETIRRLDEELRRLVEEVKRRIDELNREVEKRIREVEERIKEMDKRLREAVK

SEQ ID NO: 14705 - protein, 57 aa, Artificial Sequence
  Synthetic
DEAEKVVEKDRRLIEKWKEDLKELVRRVREKVKEIKKRVADVVKENEDSVRRIEKEV

SEQ ID NO: 14706 - protein, 59 aa, Artificial Sequence
  Synthetic
DEMLRRIDRRAERLNEDVARVIDEVAKRVTRLLERLEEKLKKIRDDIKKLDEELEEAAR

SEQ ID NO: 14707 - protein, 57 aa, Artificial Sequence
  Synthetic
DEVRELVKENRRSVKENEEELKRILDEDERLIRDWKKKLEEVVRKVAELVREIEERV

SEQ ID NO: 14708 - protein, 59 aa, Artificial Sequence
  Synthetic
DELLRRVAETVKRMDEDLNRTTEEIADTIRRLNEEVAKRIREVERTVERLIEELEEAVR

SEQ ID NO: 14709 - protein, 55 aa, Artificial Sequence
  Synthetic
DEEEELEKDARRVLEELRRELERVVREAKDINRRVEELIREVRERAKRVDDELRK

SEQ ID NO: 14710 - protein, 55 aa, Artificial Sequence
  Synthetic
ERVLREVERVLRELEREADEVLKEDRELLERWKKTVKDVVKENRDSLDELAKEMK

SEQ ID NO: 14711 - protein, 55 aa, Artificial Sequence
  Synthetic
SEEERLREEAKEVLKRLREDLKRVEEDVERVDKRLRELNEDVARKLEEVLKRLRE

SEQ ID NO: 14712 - protein, 55 aa, Artificial Sequence
  Synthetic
EKVLREVKRALDDLRRRVEEVLRKNEKSLRELEEENRRVLKKVEDLLEDIIRRLK

SEQ ID NO: 14713 - protein, 60 aa, Artificial Sequence
  Synthetic
REEDEVRKELERVERRIEDLLREVERTNREVIETSERLTKTVEDDVRRVNTEIDRLLKEK

SEQ ID NO: 14714 - protein, 55 aa, Artificial Sequence
  Synthetic
EELLRELEEVLRRIEEKLKKIDDESKKLAKEDTDRNKRIVDENTRLVEEWDKRAK

SEQ ID NO: 14715 - protein, 60 aa, Artificial Sequence
  Synthetic
SVLEEVRKKVERVIRESRELSERVREHIKRTIDEVKKLTEEVRKIVETLIRRLKELLDRV

SEQ ID NO: 14716 - protein, 59 aa, Artificial Sequence
  Synthetic
DEEVRKILTDLRKAVDEDRRRNEKLLKDSEDAVRRDEKENRDILRELRKAIEEIERRLR

SEQ ID NO: 14717 - protein, 60 aa, Artificial Sequence
  Synthetic
SMVDKVREEARKLIEEARRLSEEVKKIIDELTKRVKDLTRTSHELSKRLEDTIRELLKRV

SEQ ID NO: 14718 - protein, 59 aa, Artificial Sequence
  Synthetic
DEKLREILKRLREELKRDEDRNRELLKRVRDRVKKDEEENRENTKRVREAVEKIERELE

SEQ ID NO: 14719 - protein, 60 aa, Artificial Sequence
  Synthetic
DVLEEVRRRAEEVIREARELSKRSHDRSRELIERVKKLTEESHRLSRKLIRELEERLEKV

SEQ ID NO: 14720 - protein, 59 aa, Artificial Sequence
  Synthetic
DEEVRRILKELRDEVKRDEERNRKNTKDVKDEVDKDRRTNEKNTEDAEREIRRIKEDAR

SEQ ID NO: 14721 - protein, 60 aa, Artificial Sequence
  Synthetic
SVLEDVRRDVERLRREIEELSKRSHERSRRIIERLEELLKRSHDLSKRLRERLEELLKRV

SEQ ID NO: 14722 - protein, 59 aa, Artificial Sequence
  Synthetic
DEEVRRILKKLRDDVKKDEDDNRRNTEEVRKLAKDIERKLKKNTDDVRKDIKAIEDRLR

SEQ ID NO: 14723 - protein, 60 aa, Artificial Sequence
  Synthetic
SVLEKVKELLDRLIRELEELVKTVEEIARRLITEVRELTERSHELSRRLIKELKRLLDDV

SEQ ID NO: 14724 - protein, 59 aa, Artificial Sequence
  Synthetic
DEEVRRILEEITRVLEEIATRLKRILDELRKAVDKDRKDNERNTEEVRKLIEEIKRRLK

SEQ ID NO: 14725 - protein, 59 aa, Artificial Sequence
  Synthetic
SLLDEVRRKVKEVEDRLRKLVKDSHELSRRLIEEVERLTKTSHELSRRLIEELRELLKR

SEQ ID NO: 14726 - protein, 59 aa, Artificial Sequence
  Synthetic
DKDLRDILRKLREVLEEIERRLRKNTEDVKKVVDDDRKRNKDNTDEVRKAIREIEERLR

SEQ ID NO: 14727 - protein, 57 aa, Artificial Sequence
  Synthetic
SEIERLLEEDTKRLRDWEEAIRKNLEDSEREAKKLKDRVKKLLDDARRDIDRLKKER

SEQ ID NO: 14728 - protein, 59 aa, Artificial Sequence
  Synthetic
EEILDEVRRRLKTLNDDVERLLREVHERSKKLRETVRKIVEEVEKRITELRDRVRRAAK

SEQ ID NO: 14729 - protein, 57 aa, Artificial Sequence
  Synthetic
SDIDRLLEEDKKKLDDWRRAIEKNLEDSERRAREIKERLKKLLDEVRREAERLKEER

SEQ ID NO: 14730 - protein, 59 aa, Artificial Sequence
  Synthetic
EDILREIAKRIEDLNKEVEDLLRTVHKESRRLDREVEEIVRRVKEEIDRLIREVREAAK

SEQ ID NO: 14731 - protein, 57 aa, Artificial Sequence
  Synthetic
SEVDKLLEDDRKALEEWERRITKNLEDSKREIDDIRRRLRKNLEDSRRAIKEMKDRR

SEQ ID NO: 14732 - protein, 59 aa, Artificial Sequence
  Synthetic
EEILKRIADEIKRLNDEVKKLLEEVHERSRRLIEELRRLLEEVHRRSRKLIREVEEAAR

SEQ ID NO: 14733 - protein, 60 aa, Artificial Sequence
  Synthetic
SAEEEIEERLKRAIDRDEESVKRSAEEIKRLIEELKKSVDDSARELKELIERLKKLKKDG

SEQ ID NO: 14734 - protein, 58 aa, Artificial Sequence
  Synthetic
KEIKDLLDRVKKEVERSKRKSAKLLKELEDAIKEIEDRSRELLERAREELKRVKDDKR

SEQ ID NO: 14735 - protein, 59 aa, Artificial Sequence
  Synthetic
DETKRVRDLIRELIKRDEESVRRSARTLEELIRRLEESVKRSKKLVEDVIRKLKKLVKD

SEQ ID NO: 14736 - protein, 58 aa, Artificial Sequence
  Synthetic
EEAKKLLEDVEEAVERSKRKSRKLLEDARRALEKVKRDSDKLLEDVREEVERVLRTVK

SEQ ID NO: 14737 - protein, 60 aa, Artificial Sequence
  Synthetic
DELEKIAEELDKLIRDDKKSVDESKRLLEDLIRRDRESVEESERELTELRRRLDELRRRG

SEQ ID NO: 14738 - protein, 58 aa, Artificial Sequence
  Synthetic
REIKELLKRVRELVRESKERSRAVKERLKEEVKESERRSRELLERVRRDLEKIERDTR

SEQ ID NO: 14739 - protein, 59 aa, Artificial Sequence
  Synthetic
SELERIKKELEELIERDKKSVKDTARRLEEMERRLRESVRKSEEDLRRMIEKLEKLVTD

SEQ ID NO: 14740 - protein, 58 aa, Artificial Sequence
  Synthetic
DEARKLLEDVKRLVEESKRESKRLLDEVKKVIDRLRERSEKLLRDVERALREAEERTR

SEQ ID NO: 14741 - protein, 60 aa, Artificial Sequence
  Synthetic
EEDERIRRDLEEAIRRDRKSVEDTREELRKMIEDDERSVRDSEEKLKELIKRLEELVREG

SEQ ID NO: 14742 - protein, 58 aa, Artificial Sequence
  Synthetic
DEIRELLRRVRELVKKSKDDSRKLLEDVKRELERSKEESKRLLDEVKRAIDEIRERDK

SEQ ID NO: 14743 - protein, 60 aa, Artificial Sequence
  Synthetic
SELERIEEELKKLIEDDKKSVDDTRKELDRAIEEDKRSVERSERDLRRMIKKLEDLVRRG

SEQ ID NO: 14744 - protein, 58 aa, Artificial Sequence
  Synthetic
DEIRKLLEEVKKLVEESKRTSEELLKEVDRRLRRSEDESRKLLEEAKKAVKRIEEETR

SEQ ID NO: 14745 - protein, 59 aa, Artificial Sequence
  Synthetic
DELEEIKRRLKELIDRDRESVKRTEDELRELIKRLRKSVDDSRKEAERLIRELERLVKE

SEQ ID NO: 14746 - protein, 58 aa, Artificial Sequence
  Synthetic
DEIRELLERVERALRESKERSRKLLEDVRRAIEKVERDSEKLLKDVEEALERVKRERD

SEQ ID NO: 14747 - protein, 60 aa, Artificial Sequence
  Synthetic
REEDEIRRELKELIERDERSVEETRKELEELIRELEELVKRVEDDLRRLIEKLEDLRRKG

SEQ ID NO: 14748 - protein, 58 aa, Artificial Sequence
  Synthetic
DEARKLLKEVEELLRRSKRKSEELLKRVEELLRKAREDIRRLLEEVKRVIDKVKKDTD

SEQ ID NO: 14749 - protein, 57 aa, Artificial Sequence
  Synthetic
SDVERIIRENERKAKEIKDKVRKVIEDNERSVEEIKEKAERIVREVRKTLEEIRKRI

SEQ ID NO: 14750 - protein, 59 aa, Artificial Sequence
  Synthetic
KEMVERVERLIEEVARRSEELLRRIAKLVEDVNRESERLIREIKELAREVEKELKERAD

SEQ ID NO: 14751 - protein, 57 aa, Artificial Sequence
  Synthetic
SEVDDIIRKNEELLKKIEDDARKILKENEERVEEIKERIKKLIEDDRRKLEEIKRRI

SEQ ID NO: 14752 - protein, 59 aa, Artificial Sequence
  Synthetic
EEALDRIRKLIEKVKRESEKLLEDIKRLIDKVDKDSERLLRTVKKLSEDVEKELKDTTK

SEQ ID NO: 14753 - protein, 57 aa, Artificial Sequence
  Synthetic
SEVDEIIKDNERELDEVRREVEEIDKENKERLKEWVEEAREILDRLRKDLEEIRKRV

SEQ ID NO: 14754 - protein, 59 aa, Artificial Sequence
  Synthetic
REALDRLRRLIEKVVEDSRRLIKKVDELLKKVNKEIEDLVREVKDLVRRVKEELDRRVK

SEQ ID NO: 14755 - protein, 57 aa, Artificial Sequence
  Synthetic
EEAERILKKDDDSVRKIKKEADRIVRENERLAEEIKKEVRKIIEDDKRTLEEIEKRI

SEQ ID NO: 14756 - protein, 59 aa, Artificial Sequence
  Synthetic
EEMLRRVEEDLRRVNEESERLIRRIAKEVKRVTDESKKLLEEVKRISETVIEKMKEDAR

SEQ ID NO: 14757 - protein, 57 aa, Artificial Sequence
  Synthetic
DEVEEILKRDEEALRDIEKKVREVDERNRREVEKIKEKVKEIIKRDKDELDEIRKRI

SEQ ID NO: 14758 - protein, 59 aa, Artificial Sequence
  Synthetic
EEVLKRLEEEARRVNKTSKDLLKEVEDKIRKVNRKSEELLKKVEELSRRVIEEMRRRVK

SEQ ID NO: 14759 - protein, 60 aa, Artificial Sequence
  Synthetic
RELEELIEDLRRALERSREEVTRLLKDLEDANRRSHRHNEELIKRLRKILKEARDRVKRD

SEQ ID NO: 14760 - protein, 59 aa, Artificial Sequence
  Synthetic
EEALKDLRRVVEEVKKRSTDLNREVAKVIEEVKKRSEDLNRELEKLNRDIEERIDRETR

SEQ ID NO: 14761 - protein, 61 aa, Artificial Sequence
  Synthetic
REEEEARKILERLEEELKRSLDEVRDLIEKATKESKDVNEKIRKLLEELKEELRKVVEDTG

SEQ ID NO: 14762 - protein, 55 aa, Artificial Sequence
  Synthetic
EELVKDVERKLKRVAEESRKLVEDLRRRIKESREEIKRLVEDLERVLKEIKEEAK

SEQ ID NO: 14763 - protein, 61 aa, Artificial Sequence
  Synthetic
REEEEALKRIRETSERIKRVVDDLHRRNKKSTDDIKRRVDELHKRNEKIVREVLDVIRRRG

SEQ ID NO: 14764 - protein, 56 aa, Artificial Sequence
  Synthetic
SEVLRELDRRTKELKRRADELVTENRKLSKELEDEIRRLAERNRDAIRKIDKAVKE

SEQ ID NO: 14765 - protein, 61 aa, Artificial Sequence
  Synthetic
DEEERALETIRDTSRRIEERIDDLRRRVEKIVRDIEETIRRLHEENRKIAERVKEVIERRG

SEQ ID NO: 14766 - protein, 56 aa, Artificial Sequence
  Synthetic
SEVLKELEDETRRVKERVDKIIKELEERVEDVERKVRELVKRNEELLKKIKDDADK

SEQ ID NO: 14767 - protein, 61 aa, Artificial Sequence
  Synthetic
SREEDAVRKIRKLVEDVTRETKKMLEDVRRLVETVEKLTDDLLEEVRRLVEEVEDEIRRAG

SEQ ID NO: 14768 - protein, 56 aa, Artificial Sequence
  Synthetic
SELLREVEDLLRRHHETVRRILDEIRRLIERHHRRVREILKELDKLVKDAADEVRR

SEQ ID NO: 14769 - protein, 60 aa, Artificial Sequence
  Synthetic
SEVERVEEEVKRLATEVEKSNRDSLREIEDLNRRDRDISRRVKEEIERLIREVKKLIDDR

SEQ ID NO: 14770 - protein, 60 aa, Artificial Sequence
  Synthetic
EKKVKELLERAKKIADELRKHIKRTLKKVEEEVEKNKRDNDKLLEEARELIKRLDDEVRR

SEQ ID NO: 14771 - protein, 60 aa, Artificial Sequence
  Synthetic
DDLERVRKEIEDLNREDKRRSEEVRREVKKLIEDLEDSNRRSLEEVDRLVETVRELIDRE

SEQ ID NO: 14772 - protein, 60 aa, Artificial Sequence
  Synthetic
KEKVKRLLRTVRELMKKNKRDNDRLLKEAEDEARRVKRHIKESLKRIEEEIRRLKERLER

SEQ ID NO: 14773 - protein, 60 aa, Artificial Sequence
  Synthetic
DELEKVAEDIKKLNKEDRDRSDEVRRAVKELVKEVEKKDKDIKRRAEELIREIKEDIERR

SEQ ID NO: 14774 - protein, 60 aa, Artificial Sequence
  Synthetic
REKVRKLLEDVEREARKNEEDNRKLLKDIREEIRRLADRSRKTLEDAKRLIEKIERDLEK

SEQ ID NO: 14775 - protein, 57 aa, Artificial Sequence
  Synthetic
SEVEEVLKEIEEMLRDLERRVKESDEENRDSLRKIREDVERVDEENRDTLRRIKEKV

SEQ ID NO: 14776 - protein, 55 aa, Artificial Sequence
  Synthetic
EKVMKEVRDVIARLRDELEKVTEDSRRVNKELKKRLEDVVREIRRANEELDERVR

SEQ ID NO: 14777 - protein, 57 aa, Artificial Sequence
  Synthetic
DEVEKVLEEIKRALDDLRKKVEESKREIKEALKRVEKHTRDSDTDNKRTLREIEERV

SEQ ID NO: 14778 - protein, 55 aa, Artificial Sequence
  Synthetic
ERVVEEVRRVLEELRRRLEKVTEDSRRAIERLEREDRRVSKKSKDVNKKLDDDVR

SEQ ID NO: 14779 - protein, 55 aa, Artificial Sequence
  Synthetic
DSARKVEREVEEAARRVERTLEDVTRKVRELHDEVRRRLEEVKRRIEDLHRRVDE

SEQ ID NO: 14780 - protein, 59 aa, Artificial Sequence
  Synthetic
KDTVKRVLDDVARIVKRIEEDIKRVLEESKKLVRDIEKEIRDVKKESRDLVREIREKIR

SEQ ID NO: 14781 - protein, 56 aa, Artificial Sequence
  Synthetic
SSAEEVKRELEERHRDLRRTDEELRKDLDRVHDRARKILEEIEKKIRDMHRKVKER

SEQ ID NO: 14782 - protein, 59 aa, Artificial Sequence
  Synthetic
ERKVKKVRDESNKVVEEIMRHSDKVLERSRRLVEEIRRRLEEVLRTSREVVRRIRDEVR

SEQ ID NO: 14783 - protein, 55 aa, Artificial Sequence
  Synthetic
REVEEVLKEIEEMLKRIEDDVRRVLEEIKDVARRNEDEVRKLLRENEESVEEIKR

SEQ ID NO: 14784 - protein, 55 aa, Artificial Sequence
  Synthetic
RKVVEEVRKLLTDLKRLLEEVVKEVRKRLKELHDRTRTVAEEIRDINKKLKEEVN

SEQ ID NO: 14785 - protein, 60 aa, Artificial Sequence
  Synthetic
SSVDEVRRTIEELIRRVEELVKRSKDHVDETERRVKELVRRSHELTKEVIERVEELLRRL

SEQ ID NO: 14786 - protein, 59 aa, Artificial Sequence
  Synthetic
EDKVRKLVEDLRRALEKIRREIEKSTEESDRVLRRIEEEIRRDSEELKRALREAEEEVR

SEQ ID NO: 14787 - protein, 58 aa, Artificial Sequence
  Synthetic
SEVEELLKEVERLVREVEERVRRLHETDRKLLEDVKRKVEELHREDKKLADEVREAVK

SEQ ID NO: 14788 - protein, 58 aa, Artificial Sequence
  Synthetic
EDVERLRRELEKVAEKIRRLVEANRKTVEDARREIEKLLEENRRELDKVRRDVEREAK

SEQ ID NO: 14789 - protein, 62 aa, Artificial Sequence
  Synthetic
KEVDDLLKEVRRLVREVEKELKRLHDENRKSSEEIARRLEELHKESKELVERVKETLRDLRK

SEQ ID NO: 14790 - protein, 59 aa, Artificial Sequence
  Synthetic
EKVVRDLEREVREALRRLEEILRRDEDDVRRSREELKRIIDENREEVKRVLRELEETLR

SEQ ID NO: 14791 - protein, 60 aa, Artificial Sequence
  Synthetic
SEVDELVERNERLVDEVRRRVEDVARKLEKVSRDSDDLVRRSNEELEDRLRKVEKRVREE

SEQ ID NO: 14792 - protein, 59 aa, Artificial Sequence
  Synthetic
KKKLDEIRERSKRANDTLRKLLEDIRKRVEDSIRRLDELLKRSETRVRDIIKKLEDELR

SEQ ID NO: 14793 - protein, 60 aa, Artificial Sequence
  Synthetic
DEVDELERRNERLAEDVRRKVREVEERLKELSKRSMDIVKDVLRRLKELVDRVEKKVREK

SEQ ID NO: 14794 - protein, 59 aa, Artificial Sequence
  Synthetic
EKKVEEIREKSERVNRDLEDKLRKIEEKVKESEKRLRDLLREIEERIKRAIEKLERDLK

SEQ ID NO: 14795 - protein, 60 aa, Artificial Sequence
  Synthetic
SKVEELTERLRRLSKRSEEEVEKSNKDNDELVRRVLKRVKEVMRELEKLVEKVKEDVRRE

SEQ ID NO: 14796 - protein, 59 aa, Artificial Sequence
  Synthetic
KETLDRIRKEVEDSIERLKKLLDDSRRRSKEANDALRKLLKEIEDTIRRAIEELERARR

SEQ ID NO: 14797 - protein, 60 aa, Artificial Sequence
  Synthetic
SRVEELTEENRRLAKRLKEVVKKVLDELRRRVEEVKERVERSNKKLRDLVREVDERVATK

SEQ ID NO: 14798 - protein, 59 aa, Artificial Sequence
  Synthetic
EEIVRRIEEESKKVNRELEELLRKIEDDIRKAEEELRELVERSKREVDKALDDIDRRTR

SEQ ID NO: 14799 - protein, 61 aa, Artificial Sequence
  Synthetic
KEVDDVKKELDDVDREVKELIKRAHDKNRKVVKEVEDELRRLTEDDKRVADKVRELLKKVR

SEQ ID NO: 14800 - protein, 59 aa, Artificial Sequence
  Synthetic
KDKMKEVEDEVRKVLDTIRKLLKRDEEAVKEALDKVKKMLDDARRHSEKVLREVEDTLR

SEQ ID NO: 14801 - protein, 56 aa, Artificial Sequence
  Synthetic
SEVEELLKEVRELARRIEEEIKKLHRRNEELARRIKETIKRLIDENRKLAEDVRRD

SEQ ID NO: 14802 - protein, 58 aa, Artificial Sequence
  Synthetic
EDAKRIRDELERVRKSIEKLIRDNERFLEKVERDIRKLIEENEDLLRKIKEDVERKEK

SEQ ID NO: 14803 - protein, 56 aa, Artificial Sequence
  Synthetic
DEVRELLETVRKLAEDVERRIRELIKENERLAREVERRIKELHDRNRELAREVEEK

SEQ ID NO: 14804 - protein, 58 aa, Artificial Sequence
  Synthetic
KEAREIERELEKVKDTIRRLLERNEELLEEIARRITKLLEEDKELLERIERRIAEKLK

SEQ ID NO: 14805 - protein, 60 aa, Artificial Sequence
  Synthetic
SEVETLLRELKRLAEEVKKRIEELDRELKKLSDDVRREIERLIRENERLAREVLKEIRDL

SEQ ID NO: 14806 - protein, 59 aa, Artificial Sequence
  Synthetic
EEALREIEKLLRKVEEDVRRLIEKLKKSLEDSARDVDRLVKENERILEEVAREVEKLLR

SEQ ID NO: 14807 - protein, 60 aa, Artificial Sequence
  Synthetic
KEVEDLLRDLKRIVDEVEKRIRKLIEDNKRLADEVRERIERLHKRNKDLAEEVLKRVREL

SEQ ID NO: 14808 - protein, 59 aa, Artificial Sequence
  Synthetic
KEVVKRIKEELDRVREEVKKLIKRNEELLKKVAEDVRRLLEKDKKALEEIKRRVEDELR

SEQ ID NO: 14809 - protein, 56 aa, Artificial Sequence
  Synthetic
DELEELRKRVKENEDEVEKVLRELHKLNEENKEEVDRALEELRKRVRDIEEEIKKE

SEQ ID NO: 14810 - protein, 60 aa, Artificial Sequence
  Synthetic
RKDVVDKVRKVIEEVHKRSRDLAKEAREVNRRVHETTKKLVEDVRRVIEKVEEDVRRKVK

SEQ ID NO: 14811 - protein, 56 aa, Artificial Sequence
  Synthetic
SSLEEADKKVDKNRRDVDRALEELHRRNKRNEEEIRKALKENRETNKRLLEEIRKN

SEQ ID NO: 14812 - protein, 60 aa, Artificial Sequence
  Synthetic
REDAVRRVDKVIKEVHDESKRLVDELRDRNRRVHDETRRLDEESKKINRTVEELIRRKET

SEQ ID NO: 14813 - protein, 61 aa, Artificial Sequence
  Synthetic
DKVEELLKRLEESTRRILKRVEELLRENERLAREVRKTVERLLEENRRLIEEVERRVRRDK

SEQ ID NO: 14814 - protein, 59 aa, Artificial Sequence
  Synthetic
EKLRRELRRLLRESEKKIKEMLDRNKELLDEIERTIRELLKRNEDLLREVRERAKEADK

SEQ ID NO: 14815 - protein, 60 aa, Artificial Sequence
  Synthetic
DEAEDLLRKLKRSTDEIKKTVEKLLRENEKTSRDIEREVRELLRRNKELAERVEEVARRE

SEQ ID NO: 14816 - protein, 59 aa, Artificial Sequence
  Synthetic
EKVRRELERLLRESEKEIRKLLKRNKELLDESRDTIREMLERNKRLLEEVRKKIEKMKE

SEQ ID NO: 14817 - protein, 61 aa, Artificial Sequence
  Synthetic
SEAERLLEELKRSTDEIKKRVEKLLEDNKRTSEEIEEEVRRLLETNRKLIEDVKRKVERDR

SEQ ID NO: 14818 - protein, 59 aa, Artificial Sequence
  Synthetic
ERVRRELEKLLRDSERKIKEMLERNEKLARDSEERIRRMDDKNKDLLRRVKETIERKLK

SEQ ID NO: 14819 - protein, 61 aa, Artificial Sequence
  Synthetic
DEVEDLLRKLEESTRRILERVKKLLEDNKRLIDRVRKEVERLLRDLKRLAKEIDEEVRRDN

SEQ ID NO: 14820 - protein, 59 aa, Artificial Sequence
  Synthetic
ERVIRELEELLKESKKRIDDALRENEKLLREVKRRIEEAERTIKELLEEIKRKIAEEEK

SEQ ID NO: 14821 - protein, 60 aa, Artificial Sequence
  Synthetic
KEAEELKRRLEDLVRRVEEDNRRLLEEHKKLVKDVRKRAKELLETHKKLVEDVTREVRKS

SEQ ID NO: 14822 - protein, 59 aa, Artificial Sequence
  Synthetic
REVLEDLKRDLERARKINEESEKRIKDSDKRVHEEIRRVLEEVKKSDEEVRRRADRERE

SEQ ID NO: 14823 - protein, 60 aa, Artificial Sequence
  Synthetic
REVDELRKELERIVKEVEDVIRDLNKKLKDILKDVKDKSDELNERLKKIVEDVRRLIRDV

SEQ ID NO: 14824 - protein, 59 aa, Artificial Sequence
  Synthetic
DKMVEELERLLDEARRRVEEAIRSNEELLKRIEEESERTVRSNEKLLKEAEEEVRRAEE

SEQ ID NO: 14825 - protein, 61 aa, Artificial Sequence
  Synthetic
DEVEDVERDLKRILKEVKDRSDELIERNRKSTEDMKRRSKELNEELRRIIEDIRRLIRDTK

SEQ ID NO: 14826 - protein, 59 aa, Artificial Sequence
  Synthetic
SKMVERLERLLEEAERTSRETLKRLEDTLRESEKRSRETVRSNEELVKEVTKEVEDAKK

SEQ ID NO: 14827 - protein, 60 aa, Artificial Sequence
  Synthetic
DEVETVLRDNERTTKEAEDDVRRLNEELKEIIKRVREVSKRLIDELRRILEDVERRAREV

SEQ ID NO: 14828 - protein, 59 aa, Artificial Sequence
  Synthetic
SDFVERLRRTLEESKDKARRNVESNRELLERARKDSKRTLEELERLLETVRKSVDEMKK

SEQ ID NO: 14829 - protein, 61 aa, Artificial Sequence
  Synthetic
EREERLEEKLKKSVDDSRELIERVLRKHEKVSDKVRRELERILEDHKRVLEEIKRVLKDRR

SEQ ID NO: 14830 - protein, 55 aa, Artificial Sequence
  Synthetic
ERLKDLLDKAHEEDRRAKEEVKRLLEDTTKKIKEFLDRVERSNEEVERELEKAER

SEQ ID NO: 14831 - protein, 60 aa, Artificial Sequence
  Synthetic
DKDRKIKRIIEEVKKTIRKLLDDVRRINEEVLKELRKLLREVEEINKEILRRLKELVKTS

SEQ ID NO: 14832 - protein, 59 aa, Artificial Sequence
  Synthetic
EKVKKELDDEIRDAERELREAKKDMDRSNEELREEIKRAEERLRRLDEKLREEVEKDRK

SEQ ID NO: 14833 - protein, 60 aa, Artificial Sequence
  Synthetic
SVKEEIKEMLKKIKRHSDEALKKNKETLDRDRKRVEDVIRELKKLLDEIRKRVEDVRRRV

SEQ ID NO: 14834 - protein, 59 aa, Artificial Sequence
  Synthetic
EEIARKVRELLERVLRDDRRVVREVEELNRRMHKKNEEVAKKVRDLLREVRKELEDVDR

SEQ ID NO: 14835 - protein, 63 aa, Artificial Sequence
  Synthetic
REAEELLKELDEIIRRVEEEVKRLLDKVRETTKRIEEEIRKLDEDLKEIIREVEERIRKLKSD

SEQ ID NO: 14836 - protein, 59 aa, Artificial Sequence
  Synthetic
EEVERRIKRLREKVKKKIDELKERVRRLLEESRRKAERVEESNRDLLRELKERLEERRR

SEQ ID NO: 14837 - protein, 60 aa, Artificial Sequence
  Synthetic
SFEEEIKKIADEVEKRIRDAEKRSKDILEKSREVVERAKRRSEKLLRDAEREIKRVMEEK

SEQ ID NO: 14838 - protein, 55 aa, Artificial Sequence
  Synthetic
DEMLRRLKKVTDDVRKRLEDSHRRLEKVTEESRKRADESHEELRKLIEEVREKLK

SEQ ID NO: 14839 - protein, 58 aa, Artificial Sequence
  Synthetic
SSKERIEKILREVKREIEEAEKRSRDILKDSERIMRDVKRTTDDLLRKAEEIIREVAK

SEQ ID NO: 14840 - protein, 55 aa, Artificial Sequence
  Synthetic
EEVLKRLRELIDTVRRVLEESHKRLRELTKRSEEEARRVNEELRELIDRVRREAE

SEQ ID NO: 14841 - protein, 60 aa, Artificial Sequence
  Synthetic
DVEKRIEELRERSDRIIDEARKRSEKLLRESEKMMRDVDKTTEDILREAEEEIKRVLDEK

SEQ ID NO: 14842 - protein, 55 aa, Artificial Sequence
  Synthetic
ERVLKDLERLSKESEDELRRSHEELKRLTEESRETIEDVNRKIKEKIEDVKRKLK

SEQ ID NO: 14843 - protein, 60 aa, Artificial Sequence
  Synthetic
SAEDSIRELLERDERLLEEARKEAKRLNEENERLLERIEETVRRLLEEIKRLLDDIRKKI

SEQ ID NO: 14844 - protein, 59 aa, Artificial Sequence
  Synthetic
EELVKRVEERIKRLHDENRRLVKEVIEEVEKLIRDNEKLAEDIEREIRRLLKELDEAAK

SEQ ID NO: 14845 - protein, 60 aa, Artificial Sequence
  Synthetic
SEVEEIVKEIEKLIKENEEVVREVEKEIRELIKRNREVVERIRKELEKMLRELERLAREG

SEQ ID NO: 14846 - protein, 58 aa, Artificial Sequence
  Synthetic
EARERIKELVRRNERLLREVEKRLKTLSEENKKLLEDAKRELDRILKEVRDLLRETER

SEQ ID NO: 14847 - protein, 59 aa, Artificial Sequence
  Synthetic
SRVERLSAEIKKLIDENRRVAEELLRELEKLLKDNEDVVREVERRIRDSSRKLEELARA

SEQ ID NO: 14848 - protein, 58 aa, Artificial Sequence
  Synthetic
EAREDMDRLVRENERLLKKVEDDLRKLSEENKRLVDRARERLARLLEENERLVDERRK

SEQ ID NO: 14849 - protein, 56 aa, Artificial Sequence
  Synthetic
REAEEALKRVKEILKRIAEEVERVLTEVKKLSEDVKRRVEEVLTRLKRSTEEIERK

SEQ ID NO: 14850 - protein, 56 aa, Artificial Sequence
  Synthetic
KKLVEDVDREIKKLLEEVTKKAKRLNDENKRLLDDVRDKARRVIEESREVLERARK

SEQ ID NO: 14851 - protein, 59 aa, Artificial Sequence
  Synthetic
SSEEEVEKLERKVRAVIRKAEEDLEDSLRKSEKMAKEVTDEIEKSRRKAKAVIDDARRR

SEQ ID NO: 14852 - protein, 55 aa, Artificial Sequence
  Synthetic
EEVLKKVEELIRKVEKVIRTVLEEDRKVSEDSLRKMRKVLKEDEDVIKEVRDRAQ

SEQ ID NO: 14853 - protein, 59 aa, Artificial Sequence
  Synthetic
SMKEEVDRLLKEVKDVIREVRERIKKSEEDVRRVIDDARRKLEELSKRAREVVEEVRRR

SEQ ID NO: 14854 - protein, 55 aa, Artificial Sequence
  Synthetic
EEVLKRVKELIDEVRERIEKVLTDDRRLIERVKREIERVIRENEKVIRDARERLR

SEQ ID NO: 14855 - protein, 60 aa, Artificial Sequence
  Synthetic
DEVEKLLRDLEELDRDIERKVRELLKRNKEVLDDIEREVRRLEKELRRIIKEVADVIRKT

SEQ ID NO: 14856 - protein, 56 aa, Artificial Sequence
  Synthetic
KKEVDKIEKHSRDLIERAKRETDRLLEEAERLMREVVDRVRKILEEAKRLIDEARR

SEQ ID NO: 14857 - protein, 60 aa, Artificial Sequence
  Synthetic
DVEDEARRLEKELRDILREIADDIRKLLEENKELLKESEKDIRRAEKAIEDILDDVRKRI

SEQ ID NO: 14858 - protein, 59 aa, Artificial Sequence
  Synthetic
EKLLTEVSEEVKRLADELRELARRVKEEVKKLLDDNRETTDRIRRTVTELLEELKRKTK

SEQ ID NO: 14859 - protein, 60 aa, Artificial Sequence
  Synthetic
SVDETITEVIKRIEDTLRKVKEDADRLDERNKALLEDSKKKIKEVEEELRRILEEVRRKV

SEQ ID NO: 14860 - protein, 59 aa, Artificial Sequence
  Synthetic
RELVEEVKERAERLLKELEDLIKKVKEEVERLLEENRKTTEDILKRAKDLARELRKRTK

SEQ ID NO: 14861 - protein, 60 aa, Artificial Sequence
  Synthetic
DAKESIEEVKKRLEKSLEDSERESRKTLEENKDLLRRSREEIKKALDRLKDLLRRAEERI

SEQ ID NO: 14862 - protein, 59 aa, Artificial Sequence
  Synthetic
EKLVEEVEREVERLLRENEKTSDEIKKTSEELLKRNEETTRRILEEVERLLKRVKEATD

SEQ ID NO: 14863 - protein, 60 aa, Artificial Sequence
  Synthetic
KVEETATRLREEVKRSDTEVHRENRESEDRNKKSDEEVHKTIRDALKRVKDKLDDVRRRR

SEQ ID NO: 14864 - protein, 59 aa, Artificial Sequence
  Synthetic
DEIVRRVKEEVERLLEEHRRLAKRVRDENRRSTEEHRDLVRKVKREIERLEEELDRAEK

SEQ ID NO: 14865 - protein, 60 aa, Artificial Sequence
  Synthetic
KVEESADRARREVKRSDEEVRKRNTDSREEIKKSDKEVHERIRELLERIRRILDEVRKKR

SEQ ID NO: 14866 - protein, 59 aa, Artificial Sequence
  Synthetic
DEIVRRVEDEIEKLLREHRELVKDVERENRRLLEEHKKLVEEVEREVRRMMKKLRDATK

SEQ ID NO: 14867 - protein, 60 aa, Artificial Sequence
  Synthetic
KVEEEIEKLLRHNDELLKEVEKRAREVEERIKRSDEAVHDSIRKLLEDVKRILDEARRRR

SEQ ID NO: 14868 - protein, 59 aa, Artificial Sequence
  Synthetic
DEIVERVEREVRKLDDDDRRLAERVLRRAEELLKRHKELVERVEREVERLLKELEDAVK

SEQ ID NO: 14869 - protein, 60 aa, Artificial Sequence
  Synthetic
KAEDEARRLERHNKELLKEVRKDNTRSEREIEESDKRAHDEIKRLEEEVEEILKDIERRR

SEQ ID NO: 14870 - protein, 59 aa, Artificial Sequence
  Synthetic
DEIVERVRRTVKKLDEDDDKLVKDVRKENKDLLRRHEELVREVTERVKKLLRDLREASR

SEQ ID NO: 14871 - protein, 60 aa, Artificial Sequence
  Synthetic
DVEDEVRRAEESNRDSDRKVHEEVRRVLKSNRDSDTKAHRDVEEAKRRLKTELKDIERKR

SEQ ID NO: 14872 - protein, 59 aa, Artificial Sequence
  Synthetic
KRLVDKVRTEIKRLNDEHRKVLKKVRDLVRKLNEDHERVVRDVRREIKRLRDELRETAR

SEQ ID NO: 14873 - protein, 60 aa, Artificial Sequence
  Synthetic
DVEDEVRKMKKELDELLKRAEEEVKRVLESNEKSDDEVHKRAREAEEELRRLLDDVRRRR

SEQ ID NO: 14874 - protein, 59 aa, Artificial Sequence
  Synthetic
KKVVKDVEKKIRDLLTKLREVLRRVRREVKKLNERHEDILREVERLIEELRKRLEDTTK

SEQ ID NO: 14875 - protein, 60 aa, Artificial Sequence
  Synthetic
DIEDEVREAIERLKKLLEDSEREVRESIKRLRDLLREIARESEEANERIKRLLEEIERKV

SEQ ID NO: 14876 - protein, 59 aa, Artificial Sequence
  Synthetic
EDVRRRLRELVEKVMREIEDSNRKLRKLSKDSEKAVRDAERRNRKLVREIEDRIRKSLK

SEQ ID NO: 14877 - protein, 60 aa, Artificial Sequence
  Synthetic
EVDKEVRKVLKDIERLLEEIERRVRKSIEDLKTELKKIEDESEKANRELERLLREIKDRV

SEQ ID NO: 14878 - protein, 59 aa, Artificial Sequence
  Synthetic
EDVRRELRELVDKVRKDVERVMKALEDLSRESRREVRRVKEKNRRLVEEVKKRVEDKAK

SEQ ID NO: 14879 - protein, 59 aa, Artificial Sequence
  Synthetic
SEDEDMVRDVKRLIDEVRKLIERVKREVEDLIRRLNELDERVVRTSEELARDVKRLVDA

SEQ ID NO: 14880 - protein, 56 aa, Artificial Sequence
  Synthetic
SEDVERLKEEIKELLDRARRTIEELERRIRENVKRSRKKIEDLVRRHKKILDEARK

SEQ ID NO: 14881 - protein, 59 aa, Artificial Sequence
  Synthetic
REKEEAVKTVKELIKEVREMVERLHRKNEEMIRTVREVVKELNERNKELIKTVRDLRRR

SEQ ID NO: 14882 - protein, 56 aa, Artificial Sequence
  Synthetic
SEDARRLEREVRELLRDVREKVERNKEKVERLKREVRKRVRDDLERVKRLKEEVDT

SEQ ID NO: 14883 - protein, 59 aa, Artificial Sequence
  Synthetic
SEDERAVREVEKLIKRVEEVVRRLNERNRRLIEEVRRIVEELHRRNEDLIRKVRELAER

SEQ ID NO: 14884 - protein, 56 aa, Artificial Sequence
  Synthetic
SREMERLEREVERLLREVERRVKEDEERVRKLLEEVERLVRRNARKVEELLKEVEK

SEQ ID NO: 14885 - protein, 63 aa, Artificial Sequence
  Synthetic
SEKEKLTEDIERIIDKVRREVERLNEENERLIREVRKRVEKLNRENKEAIKRVEEEVRRLRDR

SEQ ID NO: 14886 - protein, 56 aa, Artificial Sequence
  Synthetic
EELVKRLEEKIRELLKRARDLVKEDEDRIRKLLEEIERVNRDDKRKIDKLLEEVRR

SEQ ID NO: 14887 - protein, 60 aa, Artificial Sequence
  Synthetic
KSDEEVRERVERLLREVRRLTREVRRHAKETLDTVAELVDRVRREAERLLREVEELLRRL

SEQ ID NO: 14888 - protein, 56 aa, Artificial Sequence
  Synthetic
ETEVRDVKRKADEIKEEDKRILEEAEKRHKELLEDLKRLLDRIKEEVKRVREDIKT

SEQ ID NO: 14889 - protein, 59 aa, Artificial Sequence
  Synthetic
REEDEARKRLKELLDRITKLSKEVRDLIREMLRELEESIERTKREIDDLLRRLEEIRRA

SEQ ID NO: 14890 - protein, 56 aa, Artificial Sequence
  Synthetic
SDEVERVKREIEEHLRRSEEDIRRVAEEIKKLVEESRRVIEEAKDRVRRLVERVKK

SEQ ID NO: 14891 - protein, 60 aa, Artificial Sequence
  Synthetic
SEEDDARRKVEELLRRDKKVVDEVRDELRKLLEELRRLSEEVEKLIRKLEKELREVRKRG

SEQ ID NO: 14892 - protein, 55 aa, Artificial Sequence
  Synthetic
ETVKKVEDEVRDSLRRAKKIIEDAARAIRKHLEESKRRIEEARKRLEELLKEAED

SEQ ID NO: 14893 - protein, 59 aa, Artificial Sequence
  Synthetic
SREEEAKKEVKRLLDELKKLSDDSRKRIRESHERLKRVIEEVRREAERSHEELERVIRR

SEQ ID NO: 14894 - protein, 56 aa, Artificial Sequence
  Synthetic
EKDVRKVDRDVDEILKRSEDIIRKVKEDSERLLKEVRERIEEMKKRTDDLLKEAEK

SEQ ID NO: 14895 - protein, 60 aa, Artificial Sequence
  Synthetic
RKEETLKRAEEKSKETLERNKRLLERIEEESRKTLEKNKDMLRRVKKRVEDLLREIKRDK

SEQ ID NO: 14896 - protein, 56 aa, Artificial Sequence
  Synthetic
EEELRRVIEDVLRESEKLHREDEELARRVLEESERLHREDEELARRVEKEIRELKK

SEQ ID NO: 14897 - protein, 56 aa, Artificial Sequence
  Synthetic
SLDELAKKAKEDSERSVRTDEKRLEEIARRIKELIKENEDLLREVKKEIDRLIEEI

SEQ ID NO: 14898 - protein, 56 aa, Artificial Sequence
  Synthetic
EEEARKLLEDIKRRSEELHKRNDELAREVEKRIRKLIKENRELAEEVRRRIEELRR

SEQ ID NO: 14899 - protein, 56 aa, Artificial Sequence
  Synthetic
RTDETVKKIEEDSRRSLEEDRKELEEVERRSRESIKENERLLREVAERIKRLIEEI

SEQ ID NO: 14900 - protein, 56 aa, Artificial Sequence
  Synthetic
EKTLKELADRIKERSEELHRRNEKLAREVLERSKELIKRNEELARRVIEEIKKLKK

SEQ ID NO: 14901 - protein, 60 aa, Artificial Sequence
  Synthetic
DVEETLKTVEDESRKTIETLRRSLRKSEEESKRSIDRLRESLERSREEVERLLREIERDK

SEQ ID NO: 14902 - protein, 59 aa, Artificial Sequence
  Synthetic
EEAVEKLKKLAEDVRRESEELRRELEELSKDVRRVSEELERRLRKLSEEVKKRIKDLKR

SEQ ID NO: 14903 - protein, 60 aa, Artificial Sequence
  Synthetic
SVEKILRDVEDTSRRTIEELKRSLEESKKTVTKLLEENKDLLRRIKEDVRRRLEEIKRDK

SEQ ID NO: 14904 - protein, 59 aa, Artificial Sequence
  Synthetic
EEAVERLKELAEEVKRVSKELLEELRKISEEIERRIRRLIEENKELADRVREEIERLKK

SEQ ID NO: 14905 - protein, 61 aa, Artificial Sequence
  Synthetic
DKVDRVIEEARRILERLRKRVTDVVRELEEINRRLKREVDESVKEVDEILKKLEERVRKRK

SEQ ID NO: 14906 - protein, 56 aa, Artificial Sequence
  Synthetic
KELVEKLDREVKRLLKEARELSEENRRRSKKLLDELRKSSERIREKVEDLVRRIRK

SEQ ID NO: 14907 - protein, 59 aa, Artificial Sequence
  Synthetic
SEEEAAKRRIDELLKRLKEVSDKVKEDIDELLKDLERRSREVVEEIKKLLEEVKDRVRK

SEQ ID NO: 14908 - protein, 56 aa, Artificial Sequence
  Synthetic
SERLKRVTEEAKRLHEENKKLLDDVRREARRLNEDNRRLLDEVRKRVEEVLRRIRK

SEQ ID NO: 14909 - protein, 61 aa, Artificial Sequence
  Synthetic
DEDRRALEEVRRVLEEDKRVSKRSRDLIEKVLREVEELIKEVTKRAEDVLRRVREIIKTSG

SEQ ID NO: 14910 - protein, 56 aa, Artificial Sequence
  Synthetic
RELVKKVEDEIKESEDESEDLIRRADEAVKRLRKRVRDVIEKARRDLEKIVTDAKK

SEQ ID NO: 14911 - protein, 59 aa, Artificial Sequence
  Synthetic
SIEKLIEDVRREVERIEEESKKLVKKAREDVKRSHDHSKRLMEEATRRVRDILRRAEEM

SEQ ID NO: 14912 - protein, 59 aa, Artificial Sequence
  Synthetic
KELVDDARRRVEELLRRLEDSLRKSERLVRELLKRSKEVDDRIREEVKRLLEELDDRRR

SEQ ID NO: 14913 - protein, 60 aa, Artificial Sequence
  Synthetic
DTEEILKRIEEEIRRLLEENEKLLRDAEDTVRKSLEEHERILDEVTKRIRKMLEEIARTD

SEQ ID NO: 14914 - protein, 56 aa, Artificial Sequence
  Synthetic
DETLKRLAEEVLREVERLLRENERLIREVERRADKTVKDLEKLIEEVERRIDELKK

SEQ ID NO: 14915 - protein, 60 aa, Artificial Sequence
  Synthetic
DSKEIIDKVREDIKRADEENKRLLEEVRDRIRKLLEENETLLKDSERKARELLEELRRKD

SEQ ID NO: 14916 - protein, 56 aa, Artificial Sequence
  Synthetic
EEDLKRLAKEVKDRIRELLERNRELIKEVEKRVRRLLDENRKSSEEIRKEVEDRKR

SEQ ID NO: 14917 - protein, 60 aa, Artificial Sequence
  Synthetic
SDEERALKLVEDVIRDVKRLNKRDRELIEKVERDIEKLLEDHRRLVDEVRRRVKELEDKV

SEQ ID NO: 14918 - protein, 56 aa, Artificial Sequence
  Synthetic
SELLKEVEERIKKLLKSNKDLLREVEERVRRALERVKRSDEEVHKMARDALRRVRK

SEQ ID NO: 14919 - protein, 60 aa, Artificial Sequence
  Synthetic
SEDEDAERLVEEVIRRVKELLDTHKRLVEEVERKIRELDKKDAELVKEVEKRAEDLRRKV

SEQ ID NO: 14920 - protein, 56 aa, Artificial Sequence
  Synthetic
SELLERAEREIRRLLREVKESDKEVHRRVRRMLEHNKDLLRRARDSIKKVLDEIRR

SEQ ID NO: 14921 - protein, 60 aa, Artificial Sequence
  Synthetic
SEREDAERVIERVEREIRELNRRDEELIRRVEKEIRRMLEEHKTLVKEVTRELDRLRREV

SEQ ID NO: 14922 - protein, 56 aa, Artificial Sequence
  Synthetic
SEDLKRVDKKVRDVLRSNKELLDEARKRITKVLEEVRRSDEEVKRRAEKVLDEVRK

SEQ ID NO: 14923 - protein, 60 aa, Artificial Sequence
  Synthetic
SEEEDAERAVREAAELAKKANKEDEELARRAAELAKKALREHEELVERAARLADEAEKKA

SEQ ID NO: 14924 - protein, 56 aa, Artificial Sequence
  Synthetic
SERAKKAEDDARKAAEDNRRLAKRAKEEARRAAEEVKKSDKEAEERARRAAERVRR

SEQ ID NO: 14925 - protein, 56 aa, Artificial Sequence
  Synthetic
SLERLLEEVTRRSEETVRTNEEILRRAADEVRKAIESNKDLLRKIKKEVDDVKRRL

SEQ ID NO: 14926 - protein, 56 aa, Artificial Sequence
  Synthetic
EESVRTIIEEVERTSREMNERLKKIIDEVRRTIEELNKDLKRILEEIRELVKRLET

SEQ ID NO: 14927 - protein, 56 aa, Artificial Sequence
  Synthetic
SLEETLEEVDRKSKETVKRLKELLDRIRERVEEAIKSNEDILRRIKAEAEEAERRL

SEQ ID NO: 14928 - protein, 56 aa, Artificial Sequence
  Synthetic
ESEVERIIRELERVSRELMELLKKILEEVRKRIKELNDRLEEILRRVRKRIRELEQ

SEQ ID NO: 14929 - protein, 56 aa, Artificial Sequence
  Synthetic
SLEELLERIKRDSDRTVRELEELLERAEEISRRTEKSNEDSLRRSTKEVKEAEDRL

SEQ ID NO: 14930 - protein, 56 aa, Artificial Sequence
  Synthetic
EEVVKKMLDELRDRSEKLLRTLRDIIRRAKERSDDLNRKNKESTEKVREDIRRLEQ

SEQ ID NO: 14931 - protein, 56 aa, Artificial Sequence
  Synthetic
KLEELLKRIAEESKKTVEELEKLLEEVERISKKTVEELEDSLRRSEEDAKEAEERL

SEQ ID NO: 14932 - protein, 56 aa, Artificial Sequence
  Synthetic
EDDVRRILEEVRRLSEELKTRLRKILEDLRRLSEKLKRENEESTKTVRKVIEDLER

SEQ ID NO: 14933 - protein, 56 aa, Artificial Sequence
  Synthetic
SLEELLKRIKERSEETVKRLEDLLKRVREDIDRAIKELKKSLDDSRKTVEDIEREI

SEQ ID NO: 14934 - protein, 56 aa, Artificial Sequence
  Synthetic
EEKVKEIAEEVRRRSEKMLEELKKLVDEVRKRLEDLRKRNEDSTEEMKKRVEEEKR

SEQ ID NO: 14935 - protein, 57 aa, Artificial Sequence
  Synthetic
SEVEKVIKDNKRSVDEIRKTLKRVLERNEKTLRENEKKIRDIIAEVDKRLKDLEREI

SEQ ID NO: 14936 - protein, 59 aa, Artificial Sequence
  Synthetic
DKAIKEIEEEVRRVDDRVRKLVEKLDRDIKEVDDRSRKLTDDLRRKVEEVLRRIKETVT

SEQ ID NO: 14937 - protein, 55 aa, Artificial Sequence
  Synthetic
REVEEIEKELRKIIRDLKELLRELRERLEKLDRDLKDLLRRLREENREILDRLRK

SEQ ID NO: 14938 - protein, 55 aa, Artificial Sequence
  Synthetic
EKVIRDADRMAKELKKDLRKVLEDNRRTVEKLKRDLEEVDKESDEEARKLREEIR

SEQ ID NO: 14939 - protein, 63 aa, Artificial Sequence
  Synthetic
SESEKIEREIRKLIDDSRKNSERIRREIEKLIRDSEETSKEIKKEIEDLLRELKEMLDEIKKR

SEQ ID NO: 14940 - protein, 55 aa, Artificial Sequence
  Synthetic
EEVLRRAKKALEEDKKRNDEVLDEVRKALEEDKKRNDKVLEDARRVIKKIKDELK

SEQ ID NO: 14941 - protein, 63 aa, Artificial Sequence
  Synthetic
KDEETIRRRIEELLKRSEDNSERIRRTIRELLERSKKLSEEVRKRIEELLKRLDEKVKEIRKR

SEQ ID NO: 14942 - protein, 55 aa, Artificial Sequence
  Synthetic
EEVLKEAEKRLREDKKRNDEVLKRVTEAVEEDKKRNDDVLEKVERAIREIARKLD

SEQ ID NO: 14943 - protein, 60 aa, Artificial Sequence
  Synthetic
SEEEKVIRDLERLLEENEEHSRDVERKLRESDKRLREMVKKVSDEIRKLDEEVEELLRRG

SEQ ID NO: 14944 - protein, 55 aa, Artificial Sequence
  Synthetic
EDALRRVKEALERSKKRLDKVLKDHEDSVRELKKEIDDVLKRNEETVREIEKRAR

SEQ ID NO: 14945 - protein, 60 aa, Artificial Sequence
  Synthetic
EEVERVKRELERLLEENDEHSKEVEKRIRDLDRKAEELLREIEERLRRSDERLKRLLERG

SEQ ID NO: 14946 - protein, 55 aa, Artificial Sequence
  Synthetic
ERVLKKVEDDLRESEKRVEEVLRKNEETVRRLKEELRKVLEDHKRTVEELRRRLT

SEQ ID NO: 14947 - protein, 60 aa, Artificial Sequence
  Synthetic
SREEEVEKRIREVLKRLEELLADVERRARELNRRLEKVVRDVKKEIEDLDRKLRKLLKDG

SEQ ID NO: 14948 - protein, 55 aa, Artificial Sequence
  Synthetic
EKVLKDVTDMARELERRLEEVLRKHRKSSEDLKRRIDEVLKRNEETLREIDRRLN

SEQ ID NO: 14949 - protein, 60 aa, Artificial Sequence
  Synthetic
SEREKAKRELERLLEEDRKHLKDVERELKELDEEDERHLREVEKELKELDDRAKEALDRR

SEQ ID NO: 14950 - protein, 55 aa, Artificial Sequence
  Synthetic
EEVLKEVKRLSEKSKTDLEKIVRDNKRSSDDSRRELERVIRENEETLRRLAERIK

SEQ ID NO: 14951 - protein, 60 aa, Artificial Sequence
  Synthetic
KEEEEAKKELDDLLRRLKDLYRRIREELERLDRRLEEAYRRIKEDLKRLDEELRRLLEKD

SEQ ID NO: 14952 - protein, 55 aa, Artificial Sequence
  Synthetic
EKVIRDVRKASRDTEREIRKVAEDNRKSSEDSRRKLEDVLRKNKETLDRLRDELR

SEQ ID NO: 14953 - protein, 60 aa, Artificial Sequence
  Synthetic
DEKETVEEELRRLLEELKKHIEDTERKLRKLDTDLEDVYRRIEEELRRLLEELKKMLDDR

SEQ ID NO: 14954 - protein, 55 aa, Artificial Sequence
  Synthetic
EKVLRDVEEALRRAKKRSDDVVRENEKSSRRSEERLERVLRDAKRVLKELKERID

SEQ ID NO: 14955 - protein, 61 aa, Artificial Sequence
  Synthetic
SELEEVLKRVAEVVERVSREDEKVNRKNDAAVKKVTKDDRKVLEDLERKLRELEKDAKDRG

SEQ ID NO: 14956 - protein, 59 aa, Artificial Sequence
  Synthetic
EDVIRRLEKEVRDVLKDWEEKSKEAEEKNKTVNKRWEDESRRLKKKVDRLIEKIKEDLR

SEQ ID NO: 14957 - protein, 60 aa, Artificial Sequence
  Synthetic
RSEELLREIEERIKRLKEKNEELVKEIRRRARELEREDDRAKKEIDDLARKVEEKIRRTI

SEQ ID NO: 14958 - protein, 55 aa, Artificial Sequence
  Synthetic
DDVVREVRKLIEELDRHLERLVEEVRRVVKELLEISKEILDRVREVITRLREEVK

SEQ ID NO: 14959 - protein, 59 aa, Artificial Sequence
  Synthetic
SEVEDAVRKIRELAKEIARAIDELLKEHEELIRTVADALEKLVRTSDKLAEDIARVIDG

SEQ ID NO: 14960 - protein, 56 aa, Artificial Sequence
  Synthetic
RELLEELKRILEDLERRAKEIVDRARELNKRAEDEIRRLIEDSKRKLEEIRKRIEE

SEQ ID NO: 14961 - protein, 59 aa, Artificial Sequence
  Synthetic
KEAEEAVKRLRDLVRRVEEETKRLLRESRESLKTLEEITDRLLKRSEESVKEIEKVITR

SEQ ID NO: 14962 - protein, 56 aa, Artificial Sequence
  Synthetic
RELLTEVTKLIKDHHDKVREILRESDKELDRHHKDVERILERSKRELERLEDEVRR

SEQ ID NO: 14963 - protein, 57 aa, Artificial Sequence
  Synthetic
SREELLKEIKKKIDDIKRENEKLLRDIERLIRELEKRDKELLDEARKTSEELVRRAG

SEQ ID NO: 14964 - protein, 55 aa, Artificial Sequence
  Synthetic
RDVVRDVDRILTEWKKESEDLVEEVKELIKRWKDTSEELVRRVRELNERIDRETR

SEQ ID NO: 14965 - protein, 60 aa, Artificial Sequence
  Synthetic
SEVETVEEKVKKVIEDLRRLLKEVRDRNRRIIEEIKRLLERVAEKNKRIVDEIRDLLRRR

SEQ ID NO: 14966 - protein, 56 aa, Artificial Sequence
  Synthetic
EDIIRRIDELFREILKEVKRLNEESKRRLEKLEEDIKRLDDRSREEAEKLRDAVRR

SEQ ID NO: 14967 - protein, 60 aa, Artificial Sequence
  Synthetic
SEVEKVARDVEEVIRTSEDKTRKLEKRNKDIIREIKKLLDDLARENKRIADEIKRKLDER

SEQ ID NO: 14968 - protein, 56 aa, Artificial Sequence
  Synthetic
KRLIDEIRREMERSHRRDEEVNEKSKREADKLRRDVEKLDEDSARELKKLEDEVRT

SEQ ID NO: 14969 - protein, 60 aa, Artificial Sequence
  Synthetic
SEVERVERELDKVITDLRRLLDDLKRKNEELVRRIRELLKKVKERNKKIVTEIDDLLRRR

SEQ ID NO: 14970 - protein, 56 aa, Artificial Sequence
  Synthetic
ERIIRRIKELADRIEERVKELNERVREEVRKLEEDIKKLDDESREEARKLEDKVRQ

SEQ ID NO: 14971 - protein, 60 aa, Artificial Sequence
  Synthetic
SSEEIRREIERESEDTRRRLDRVLEDIERLSRETKEHIKESLERVRREHDRLRRELERKA

SEQ ID NO: 14972 - protein, 55 aa, Artificial Sequence
  Synthetic
EEVRREVRKLIEESRRAIDEVKRRVEELIKESRDRNRRIEERVKELVKENAERIR

SEQ ID NO: 14973 - protein, 60 aa, Artificial Sequence
  Synthetic
KSEEIRRKIEEDSRRTKKELDDILDEIRKLAEKVKKEIEELLRKVRRRHEDMKRRLREKV

SEQ ID NO: 14974 - protein, 55 aa, Artificial Sequence
  Synthetic
EEVAKEVKKLIEESRKLLEELKDTVRRLIKRLKELLEELERRVEELIKENEERIR

SEQ ID NO: 14975 - protein, 60 aa, Artificial Sequence
  Synthetic
RSEDILREIEDLSRETKEKIDEILERIRKLAEEVKRHIDESLKEVRRRHEEADRELDEKM

SEQ ID NO: 14976 - protein, 55 aa, Artificial Sequence
  Synthetic
EEVAKEVRDLIRRSEDLLRRILETVDKLIKELRKLNEDILERVRKLIKKNKDDIK

SEQ ID NO: 14977 - protein, 60 aa, Artificial Sequence
  Synthetic
KSEEIERRIRERSRETRRELEEVDKKVKKRHTELREHLKRSLKKVKEDHDDLKRKLEEKI

SEQ ID NO: 14978 - protein, 55 aa, Artificial Sequence
  Synthetic
EEVEEEVKRLIEESKELIKRLEEEVDKLIRDNKKLNDDILRRVKRLAEENDERIR

SEQ ID NO: 14979 - protein, 60 aa, Artificial Sequence
  Synthetic
SSEDILRDIERIARKLREDLKRVLKRVKELSDDTRREIERLVEEVERIHERLRRELERKV

SEQ ID NO: 14980 - protein, 55 aa, Artificial Sequence
  Synthetic
ERVADEVRKLIAELEKLIRDLKRRVDELIRRSRELLERIRDRVRKLIEENKRAID

SEQ ID NO: 14981 - protein, 59 aa, Artificial Sequence
  Synthetic
SKVEEAKREVDRVIKELREDIKRVEEEVDKLIKDHEKLNKELEDESRKLAERVEKLRRD

SEQ ID NO: 14982 - protein, 56 aa, Artificial Sequence
  Synthetic
EKIVRDIKELLRDLRREVEKVIERIDRLIKRLEEESRRLFEESEKAIRELKRRVDK

SEQ ID NO: 14983 - protein, 59 aa, Artificial Sequence
  Synthetic
KKVEEAKKEVKEMIRRHRERNKEVEKEVKDLARKHEKENRDVAETSKRLAEKVKKLRDD

SEQ ID NO: 14984 - protein, 56 aa, Artificial Sequence
  Synthetic
EEIVKDIKREIEELEDESRRILEEIREDIDRLRRRSEKLFEDSRELIERMKREVDR

SEQ ID NO: 14985 - protein, 60 aa, Artificial Sequence
  Synthetic
DEIEKVRKRAEDLNREDKRLSERAFEESKEVVEEHRRLSDRARRESDRVVEEVEKTLKDK

SEQ ID NO: 14986 - protein, 56 aa, Artificial Sequence
  Synthetic
RKILEEIRKAIDRNRDENRRLVEESKKELDELRKEDEELVERSKRKLEELDRRAKK

SEQ ID NO: 14987 - protein, 60 aa, Artificial Sequence
  Synthetic
SRIETVKDELRRIAEDVRRALEEIEERLKDLNRRDEELTKRIEDTSRDILRRVEEVLRRN

SEQ ID NO: 14988 - protein, 56 aa, Artificial Sequence
  Synthetic
EKILKEVADRLRELKRRAERLIEEVTRLLKENEKRNKEVVDTSREALREIRDRVRK

SEQ ID NO: 14989 - protein, 57 aa, Artificial Sequence
  Synthetic
SKEDILREIEKRIRKIEKEAEELLRESRKILEELEERDRRLLERVKREIDRLLEETG

SEQ ID NO: 14990 - protein, 59 aa, Artificial Sequence
  Synthetic
EELLRRVERELKKLIDEVRKVLKDNFDRNRELAKEWEDLSRELFKRAKELIEKVEEASR

SEQ ID NO: 14991 - protein, 57 aa, Artificial Sequence
  Synthetic
SKEDILREIKKRIEEIERDARRLLEESKRILDELRKTDEKLLRESEERVEELERKSG

SEQ ID NO: 14992 - protein, 59 aa, Artificial Sequence
  Synthetic
EELLKRVMEELRELIERVERELRRNARENRELARKWKKLSEENKKKNDDLIREVDEASR

SEQ ID NO: 14993 - protein, 60 aa, Artificial Sequence
  Synthetic
DEKERIEEEIRRILEELERKVDEAREEIKRMDEELKRRIEEIARRSRELDDELRERVDKD

SEQ ID NO: 14994 - protein, 55 aa, Artificial Sequence
  Synthetic
EEVRKEAERVLRKIEEDIDRVLRENEDSVRKLRTEIDRVEEENRRSAKRIRERLK

SEQ ID NO: 14995 - protein, 59 aa, Artificial Sequence
  Synthetic
DEVRDVVTRIRDLLRRIKERLEELTERIRRLLEKIHKTTEDLARRNRKLIDEIRKEIDK

SEQ ID NO: 14996 - protein, 55 aa, Artificial Sequence
  Synthetic
EDVKREVKELLDKIREDLERVREEAKRSNEENRKRLEEVVEESERLLEELKRRST

SEQ ID NO: 14997 - protein, 55 aa, Artificial Sequence
  Synthetic
DEVREVLKELKKVLREIEKAVRDVLEEDREMHERIARKVKKVLDENKKSLDDLRR

SEQ ID NO: 14998 - protein, 59 aa, Artificial Sequence
  Synthetic
EKKLKEIADKIRELLERLKDRLEKIAREIRDVNRKLDEDLEDIVRRIRDVDKKLDDKTK

SEQ ID NO: 14999 - protein, 63 aa, Artificial Sequence
  Synthetic
SVLEEIEREVEEIRRRIEKVLKELNDDDRRVIEDSKRLNEKLEKEVRDIERKARDLLRKLKDT

SEQ ID NO: 15000 - protein, 59 aa, Artificial Sequence
  Synthetic
REELEKLKRRLDEELDRVREKVEENIRRTDKAVEDSERENERLKRELDEKVKRIRDELR

SEQ ID NO: 15001 - protein, 55 aa, Artificial Sequence
  Synthetic
SDEEDVERLVKELIDRVRKTDAELERKVDEVIRELKEVIKRIEDHSRDSIRKLRN

SEQ ID NO: 15002 - protein, 55 aa, Artificial Sequence
  Synthetic
RELIKRLRDAVRESEKENKRINERLRRVIEKAKRDLEKILEEDRRVLEEMAERAK

SEQ ID NO: 15003 - protein, 56 aa, Artificial Sequence
  Synthetic
SEVETIKREIDKLMKELTEKIKRIKEEDDKVHEELKRAVDRSRERLEEVLKELRDR

SEQ ID NO: 15004 - protein, 59 aa, Artificial Sequence
  Synthetic
EKEIRDLMREIREVAERAKKRVDELLERIRRINTKLKEELKELHKRTEDLIKKAKEEVN

SEQ ID NO: 15005 - protein, 56 aa, Artificial Sequence
  Synthetic
KEVEEIDERLKRVLEELRRMLEESRKEDERVHDELRKEAEKIKRELDKAVEELRAR

SEQ ID NO: 15006 - protein, 59 aa, Artificial Sequence
  Synthetic
KKVIDDLLRKIEKLIREMKKRLKDLHEETKRINEELERRLRDLERRVRDLLRRAREEAN

SEQ ID NO: 15007 - protein, 56 aa, Artificial Sequence
  Synthetic
SEIERIKEEDEEVHKRLKEINDRINKEDKDVHDKLRDEARKIEERLRRVMEELRAN

SEQ ID NO: 15008 - protein, 59 aa, Artificial Sequence
  Synthetic
EKVIRKLLEEIRRINEELERRNRKLMKDIREINERAEEKLRRLAEEIEELIKKLKEEVK

SEQ ID NO: 15009 - protein, 56 aa, Artificial Sequence
  Synthetic
SEVEEIKREDDKVHEDLKKAADDIRKRDEDVNRKLTEAIEEIRREVDKALEDLERR

SEQ ID NO: 15010 - protein, 59 aa, Artificial Sequence
  Synthetic
EEVIRRLMEKIRRINAELRKALKRLLEEIEDINRKLEEEVKKILEEIRRVLEELRRRAN

SEQ ID NO: 15011 - protein, 61 aa, Artificial Sequence
  Synthetic
SEVEELVKELRRLIEEWDRRSKRLMEELKELAERIDKTTKELLKELEDLVEKIKRELDKKG

SEQ ID NO: 15012 - protein, 55 aa, Artificial Sequence
  Synthetic
ERVAEEVKRAIERAKRESDKIERDVRELNRRNREILKKIKKRVEDVLRKLRKDLE

SEQ ID NO: 15013 - protein, 59 aa, Artificial Sequence
  Synthetic
DEVEELKERLRRLAETIARRIRELVERLRDSARKIEKRVRELAKKLRDSVREITKVIKD

SEQ ID NO: 15014 - protein, 55 aa, Artificial Sequence
  Synthetic
EEIREEVEKAVRDLEELLKELKRESEETIRRIEKLVRDLERESEEAVRRLKEEKD

SEQ ID NO: 15015 - protein, 59 aa, Artificial Sequence
  Synthetic
SEEEKLKKELEDLARRIEKRLRELVEELERSVREIERRIEKLHKELEESVDRIKKVVDK

SEQ ID NO: 15016 - protein, 55 aa, Artificial Sequence
  Synthetic
DEIRRRVEEVVRRLEKIVKELEERSREVLKRLREEIEKHKKRSEETKERIRTRAT

SEQ ID NO: 15017 - protein, 59 aa, Artificial Sequence
  Synthetic
SEVEELLKRLEDLIRKIEERLKELVKRLKESAKEIEERLEELHRRLKESVDRIREEIEK

SEQ ID NO: 15018 - protein, 55 aa, Artificial Sequence
  Synthetic
EEIKKEVKKALERLKKIVEDAKKVSEETMERIRKLVEEHKDTSRKTVEDLERATK

SEQ ID NO: 15019 - protein, 59 aa, Artificial Sequence
  Synthetic
DEVERLMEELRRLLEEVRKRIEDLIRENRKLVKEIKDRLEKLLRDNERLAREIEEVIRS

SEQ ID NO: 15020 - protein, 55 aa, Artificial Sequence
  Synthetic
ERIREEVKRAIEKLKELVEDSNREVTEALKEIEDLLRKLKERSEELLRRIKARTD

SEQ ID NO: 15021 - protein, 60 aa, Artificial Sequence
  Synthetic
KEVDELDEELKKHAERIDRELERLDRENEKHVEDVRRELERLREENERHARRIEDEVKKR

SEQ ID NO: 15022 - protein, 59 aa, Artificial Sequence
  Synthetic
RKTLEDIRRKVEKSLRELEKKLEEIDKKNRDTLEEARRELERIRRENEEVIRRLDKRRR

SEQ ID NO: 15023 - protein, 60 aa, Artificial Sequence
  Synthetic
KEVEELVRKLREHVRDIKRKLEELLKENEDHARRAEDRLRELTKENRDHVKEMEDVLRRD

SEQ ID NO: 15024 - protein, 59 aa, Artificial Sequence
  Synthetic
KDTLERLEREVRKSIKELEDKLREIRKRNKEVIDKLRDILEKIKKENREALKRLRDTEE

SEQ ID NO: 15025 - protein, 60 aa, Artificial Sequence
  Synthetic
SEVEKLTEELRRHVEEIERDLDRLRKENERHAKKIKDELKRLLEELEEVARRIEAELERD

SEQ ID NO: 15026 - protein, 59 aa, Artificial Sequence
  Synthetic
KDMLRRIEEEVERSIRRLEELLERIRERNEKVIEDLKELLKRIRDRAEEVKDRLRRTRK

SEQ ID NO: 15027 - protein, 60 aa, Artificial Sequence
  Synthetic
SEVEKLKKELEDHVRDIEKKLRDLMRENEEHAKRARERLKKLLEDNEENVKDIEDKVRKK

SEQ ID NO: 15028 - protein, 59 aa, Artificial Sequence
  Synthetic
EDTLRKIREDAKRSEKKLEEILRTIRKRNEKVIRDLRRLLEELRKRNREAIERLRKELE

SEQ ID NO: 15029 - protein, 60 aa, Artificial Sequence
  Synthetic
SEVERLAEELRKHVEEIKKELRKLKEKLEKLARDIERELKRLRDENKKHADDIRDKVEKR

SEQ ID NO: 15030 - protein, 59 aa, Artificial Sequence
  Synthetic
KDTLRRIEEEVKKSERELREELKRLEERVRRVIEKLEDLLRRIEKENEEVKRDLERRRK

SEQ ID NO: 15031 - protein, 60 aa, Artificial Sequence
  Synthetic
SEVDELKRRLDEHAKDIRDKLRKLVKELREHAKRAEDELRRLLKENEDNAREIRELVKTL

SEQ ID NO: 15032 - protein, 59 aa, Artificial Sequence
  Synthetic
EKTLRDIKRAVEKSIRDLERILEELRKEVEDTIKRLEDILREIRKRNKDVIDDLRRRMK

SEQ ID NO: 15033 - protein, 60 aa, Artificial Sequence
  Synthetic
SEVDRLVRELDKHVEDIERTLKKLREENEKNVEEIKRTLKKLVDELRKLAREIIDTVDKN

SEQ ID NO: 15034 - protein, 59 aa, Artificial Sequence
  Synthetic
EKTLRDIKRRVDKSLEDLKRTLEEIKRENERTLEEIKKILEDMEREVRDIERKLREKEK

SEQ ID NO: 15035 - protein, 60 aa, Artificial Sequence
  Synthetic
KEVEDLVRELEKLIEEIKRRLEELDKELKKHVEDAERRIKKLLDENRENAERILEKLRRD

SEQ ID NO: 15036 - protein, 59 aa, Artificial Sequence
  Synthetic
EELLRRAKERVREALEDLRRILEEIRRKVEETIRRLEKLLKELRDRNRRVLEELERTLK

SEQ ID NO: 15037 - protein, 60 aa, Artificial Sequence
  Synthetic
REKEEIKREVEEAKKRLEDLLREIAEEVKRALERLRELNERNNDRARRVLKRLTDELRRV

SEQ ID NO: 15038 - protein, 55 aa, Artificial Sequence
  Synthetic
DRLSERLRRLVREIEETLKELLKALRRLLERIREVSEELHRRSEELVERILRKLK

SEQ ID NO: 15039 - protein, 60 aa, Artificial Sequence
  Synthetic
REKEDIEEKVKRVLERLERLNRENNKESERLLRRLEELNKRNNEAVKELLDRLREILKRV

SEQ ID NO: 15040 - protein, 55 aa, Artificial Sequence
  Synthetic
DRLMEELKRLAREAERVSEELHDRTRRLAEEIEKVSKELHKKSEKLAREIKKRLD

SEQ ID NO: 15041 - protein, 60 aa, Artificial Sequence
  Synthetic
KEAEELIKELKDLAERIRRENRRLLEELKKLVEEIRRRIRELIERSEDSVRKIEETVKRK

SEQ ID NO: 15042 - protein, 55 aa, Artificial Sequence
  Synthetic
EKAERELKKISEDDERSIKELEDLLRKVEEDIRRLLDELRDIMKKTKEKVDELRR

SEQ ID NO: 15043 - protein, 60 aa, Artificial Sequence
  Synthetic
DEAERVKRELERLVKEIKEENRRLLRELRELSKRSREVLERLLRKLEDLVRKIREVLERL

SEQ ID NO: 15044 - protein, 59 aa, Artificial Sequence
  Synthetic
KKVLDEIEKEAEEIKRENKDFNRRIEREVRESKREIEEVVKRIREIAERVDRDIDRTRR

SEQ ID NO: 15045 - protein, 60 aa, Artificial Sequence
  Synthetic
DEEREVKERLRDLTRRIRETIKRLLDKNKDLARRIREVNKETSEELERLARDIERVLEEL

SEQ ID NO: 15046 - protein, 59 aa, Artificial Sequence
  Synthetic
KKVLDEIREAAERVKREIEELLKEVHRINTELNKDNTELNKRNREIVERVKRRIDERAR

SEQ ID NO: 15047 - protein, 60 aa, Artificial Sequence
  Synthetic
DEVEEVKKALEDLAEKIRDLNRKILEKNKKLADDIRRLNEKLLRELRKLVEEIERVLRKL

SEQ ID NO: 15048 - protein, 59 aa, Artificial Sequence
  Synthetic
KELLDEIRRRVEEVKKDNERVNKEIEELNRKLDEDNERANREIRDTVEKVRRRIDEEEK

SEQ ID NO: 15049 - protein, 61 aa, Artificial Sequence
  Synthetic
SEIEEIEKEIRRVLEEIERLLRTLKKINDDVKRESEKLVRDDKKKIDDALRELRKLAAERG

SEQ ID NO: 15050 - protein, 59 aa, Artificial Sequence
  Synthetic
DEVVRRAEKLLKEIRDTVETALKELEDKNERSERENKRVAEESERKLRKIKEEVDKAAE

SEQ ID NO: 15051 - protein, 60 aa, Artificial Sequence
  Synthetic
RKVEEIKKRLKELKERLEESVKRIKDRLRKLEEDNRRLAEEVKKRLEELLKRLEDLVKRR

SEQ ID NO: 15052 - protein, 59 aa, Artificial Sequence
  Synthetic
EKAVKELEDELRRIEKTSRDVLKELEDILRRLREESKRVADELRELLRRVKEKVERETK

SEQ ID NO: 15053 - protein, 60 aa, Artificial Sequence
  Synthetic
SEDDRIRERLKELVDRNDELVKRIKRALDELLRELRKSVEDIKRTLDDLARKLEELARRR

SEQ ID NO: 15054 - protein, 59 aa, Artificial Sequence
  Synthetic
REVVEDLKRILRELEKRSEDVLRELKKKLDDVEKESRDVLRELTEKLKKIEEDVRRAEK

SEQ ID NO: 15055 - protein, 60 aa, Artificial Sequence
  Synthetic
REVEEIERRIRELLETNREIAERTTEEIKRLKKELEDSLEEIKKRLKELVDELRKLATDR

SEQ ID NO: 15056 - protein, 59 aa, Artificial Sequence
  Synthetic
EEAVRRLEELVREIEDRSERLNKENEDELKKIEETSRKALKELEDRLREVKKEVREAER

SEQ ID NO: 15057 - protein, 57 aa, Artificial Sequence
  Synthetic
DSDRELEKKIRDSLKRLEEALRELEERLKRSLEDDERVHEELRRRAERIRETIKKRL

SEQ ID NO: 15058 - protein, 59 aa, Artificial Sequence
  Synthetic
SELVKRMKERVDELHKRTEELLERLKEELKKLHDETRDINRELKKRLEDLERKIEEAAK

SEQ ID NO: 15059 - protein, 57 aa, Artificial Sequence
  Synthetic
KEAEELRRLIEESKRTDKKVHEDLKEEVRKIEEEDDKAHEELRKEVERIKKKIDDDM

SEQ ID NO: 15060 - protein, 59 aa, Artificial Sequence
  Synthetic
SELIKRLKDEVKKLHDETERINRELKKELDDLLRRVRKINKELKEELKKLERKIEEAAR

SEQ ID NO: 15061 - protein, 57 aa, Artificial Sequence
  Synthetic
SSREELEKRIRESEKRDREMHERLRRTAEKIEKEDKEMHDRLREKAERIEERIDKEV

SEQ ID NO: 15062 - protein, 59 aa, Artificial Sequence
  Synthetic
SELIERIAERIERLNRDTERINRELEEKLRRLLKRIREINTELDKRLKELLDRIEEASR

SEQ ID NO: 15063 - protein, 57 aa, Artificial Sequence
  Synthetic
SSEEKIEKASEDNERKVKEVLREIEELSKKDKTDVERVLRELEKRLEEIKREVDRRD

SEQ ID NO: 15064 - protein, 56 aa, Artificial Sequence
  Synthetic
EEDLKRELDEIDKRTEELARELRELMREIHERTKRLADDLRRAIDEIRKKIEEDAR

SEQ ID NO: 15065 - protein, 59 aa, Artificial Sequence
  Synthetic
DELEDLLRRHRELVKRSLERLKDLLERNRELIEDSERRAEELLRELRRLIEEIKKVLDE

SEQ ID NO: 15066 - protein, 59 aa, Artificial Sequence
  Synthetic
KKVLEELKRSNDEANERHKTVLRRLEEENKRANDSHRKIKEELKDLLRRVDETVKEKRR

SEQ ID NO: 15067 - protein, 59 aa, Artificial Sequence
  Synthetic
SRLEELLKTHKKLVEDSVDEVRRLLERNRKLIEDSKERLKELLRTNEELIRTLKEVLDR

SEQ ID NO: 15068 - protein, 59 aa, Artificial Sequence
  Synthetic
EEVLRRLKESNKKANEDHRRLNEENKDLNRRANEEHKKVNDRNKELLDRARRTADEKRR

SEQ ID NO: 15069 - protein, 59 aa, Artificial Sequence
  Synthetic
DEVDELVKTHERLVEESERRIEELLERNRRLIERITERAKELLKENKRLIEEITEVLKR

SEQ ID NO: 15070 - protein, 59 aa, Artificial Sequence
  Synthetic
KDVLERLKDSNRKANERHKRMNEENKRLLEDVERRIKELNKRNEDLLREAEKRVRDERR

SEQ ID NO: 15071 - protein, 60 aa, Artificial Sequence
  Synthetic
SELEELLKTHKKLVEDSVERVRDLLRENKRLIEESEKEIRKLLDELRELIERIIELVERG

SEQ ID NO: 15072 - protein, 59 aa, Artificial Sequence
  Synthetic
KEVLERLKKSNKEANDEHRRLNDENRELNERANRKHKEVEDRLKDLLRRAEEKLTEDAK

SEQ ID NO: 15073 - protein, 60 aa, Artificial Sequence
  Synthetic
DEVERLITKHRKLVEDSRRRVEELLRRNAELIKTSKRRVEELLERNRRLAEELRRLLKEG

SEQ ID NO: 15074 - protein, 59 aa, Artificial Sequence
  Synthetic
DEVLRRVEDSNRRANETHKDLNRKNKELNEEANRTHEELLRRNEKLLREIEDTVDRETK

SEQ ID NO: 15075 - protein, 60 aa, Artificial Sequence
  Synthetic
SEVEKLLKELEDESRKSEDDNRRLLEELRRLSEESLRDLRRLLEDLKRLAEEIEREVRKR

SEQ ID NO: 15076 - protein, 59 aa, Artificial Sequence
  Synthetic
DELKKRVDEVLETSRELLRESKRKIEEIARRSEEELKRVKDEVDDTARRIKRKIEEAEK

SEQ ID NO: 15077 - protein, 57 aa, Artificial Sequence
  Synthetic
DSERRLDEILERAREVNEESSRRLDKLLRETEEKNRKSTEELRKIVEDLKRTVKDES

SEQ ID NO: 15078 - protein, 56 aa, Artificial Sequence
  Synthetic
AETVIRRIEKLLEDLKRVDDKILEEHKDLSKKLDDVDREIKERIKKLIKDLKDTAR

SEQ ID NO: 15079 - protein, 57 aa, Artificial Sequence
  Synthetic
DSEEELKDILRKAKEDNDRSSDKLRRLLEETEKRNRDSTKRLEELLEETEREVRRRS

SEQ ID NO: 15080 - protein, 56 aa, Artificial Sequence
  Synthetic
AETVKERIKKLLKDLREVDREILERHKKMSDDLKRVDEEISKTHKELSRRLKETAR

SEQ ID NO: 15081 - protein, 57 aa, Artificial Sequence
  Synthetic
SKEEDLKRILEEAEKTNKESSDRLRELMDRTRRENEESSRTLKEIVKDADRRVAEII

SEQ ID NO: 15082 - protein, 56 aa, Artificial Sequence
  Synthetic
VERVKEDIERLLDELRKVDREILETHKKLSEELRRVDEEIIKRVKDLIRTLEKAAE

SEQ ID NO: 15083 - protein, 57 aa, Artificial Sequence
  Synthetic
SSEERLRTILREIEKTNRDSSKRLRDLLRETKRENKESSDELRKLLEETRDEVEKRR

SEQ ID NO: 15084 - protein, 56 aa, Artificial Sequence
  Synthetic
SDTVAERIRRLLEELKRVDEEILKTHKDLSDRLRELDEEIKKTHEKLSEELRRAAN

SEQ ID NO: 15085 - protein, 60 aa, Artificial Sequence
  Synthetic
KEVEEILETHKEIARELREVAEEIIRDHERILRDLEKKIRELRRTHERMVEELDRVAKEG

SEQ ID NO: 15086 - protein, 59 aa, Artificial Sequence
  Synthetic
KDALDKLRDSDRRVHEDVRRMLKRLDDSDKRVHDRVRKVLEDLKRSNDELRRTVEERER

SEQ ID NO: 15087 - protein, 60 aa, Artificial Sequence
  Synthetic
SEVEKILEDHKRIVDELEKEAKKIEETHTELVKRLREEVEKLKEELRRLLEELKDMARRG

SEQ ID NO: 15088 - protein, 59 aa, Artificial Sequence
  Synthetic
EEALRRLKKSDEEVHRRVREILKRLEKSNRDLNDDSRKVEEELKRILRRIEEEAKRTED

SEQ ID NO: 15089 - protein, 61 aa, Artificial Sequence
  Synthetic
SEAERLLDELRRLLEEIKRRIEELLEESKRSLEEVEKRSKELLDRLEDLLRKIKEEIRKDG

SEQ ID NO: 15090 - protein, 59 aa, Artificial Sequence
  Synthetic
EEVKERLERLRERIKREIDRVIRELRELDKRAKEVSKRTKEELEKILEKVRRVIEEVKR

SEQ ID NO: 15091 - protein, 61 aa, Artificial Sequence
  Synthetic
DDVDRLLDELRELIDRIRKDLERLLKESRDSLEELRRRSEELLKKLEEEIREVVERIRREG

SEQ ID NO: 15092 - protein, 59 aa, Artificial Sequence
  Synthetic
DELKRRAEKLLEDLRRVIEEIKRRLDKVNDEVREVSKETTDRLDDLVRKARELIRRVEK

SEQ ID NO: 15093 - protein, 61 aa, Artificial Sequence
  Synthetic
SEREKLLTDLRDLLKKVVDTLRRLNEELKKSIEESKETLERLNRTLKKLLDEVKKKLEDDG

SEQ ID NO: 15094 - protein, 55 aa, Artificial Sequence
  Synthetic
DELRKIVEEIRTELDRVRETNERILKEVRDEHRRVDKTNTDIERDIERVIKEVET

SEQ ID NO: 15095 - protein, 61 aa, Artificial Sequence
  Synthetic
KKDEDLKKLLKDNEDVMKKAADEVKRLNDENRDLMRRVAEKIEDLLRRLEKLLRDILRRRG

SEQ ID NO: 15096 - protein, 56 aa, Artificial Sequence
  Synthetic
SKTVKDRIKRLTDELERVNRELSEEHKRVLDELRKRNKEILDRLKELLKRLKEEAD

SEQ ID NO: 15097 - protein, 60 aa, Artificial Sequence
  Synthetic
SSEEELERLLEELRRITEEAKERMERSSKELEDVSREAEKRLEKSSRDLDKTVRDIKRRI

SEQ ID NO: 15098 - protein, 56 aa, Artificial Sequence
  Synthetic
AEDVKRRVRELIEEHKRLNKELLDESRELLKTHAELVKRILDESRRLLEELEKAAR

SEQ ID NO: 15099 - protein, 60 aa, Artificial Sequence
  Synthetic
SEREDATRRLRDIIRRLRDLIRRLTEESEESIKEIRERIERIIRTSEESLKELEERIRRN

SEQ ID NO: 15100 - protein, 55 aa, Artificial Sequence
  Synthetic
EDLERLREEIEDVVRKAEKRLDELHDEIRRTIEDAERRLDESNERAEKVVRDAEK

SEQ ID NO: 15101 - protein, 60 aa, Artificial Sequence
  Synthetic
SDEERALEKIRRLIEDLRRMVREMLERSKKSLEEHKELAREILRRSRESLERLKDVARRN

SEQ ID NO: 15102 - protein, 55 aa, Artificial Sequence
  Synthetic
RELDKLREELEEVVRRVEEKLDDSDRRANEVTREIEKTLDDLHREAEEVVKEIRR

SEQ ID NO: 15103 - protein, 60 aa, Artificial Sequence
  Synthetic
SVEETLRRLLEESERVNRRVKEDLDRIRRESEEVNKRAEEMAKELLDEIRKDIDRVRKRN

SEQ ID NO: 15104 - protein, 59 aa, Artificial Sequence
  Synthetic
EELAKEVIKTLRKLIEESKRNHEDLRRELRELIEESKRDHERLLRRLRELIKRIRDTTK

SEQ ID NO: 15105 - protein, 61 aa, Artificial Sequence
  Synthetic
DEIEDLLRRAEKLIRDLKRKNDKLLKESEELLERLRERAKEVLDESKKLLEELRELVRRRG

SEQ ID NO: 15106 - protein, 59 aa, Artificial Sequence
  Synthetic
ERAARDVERLKRRNKKVVEDSEDLARKTNKKSEELLREIRKRVEDSNRETKEILDRVRK

SEQ ID NO: 15107 - protein, 60 aa, Artificial Sequence
  Synthetic
DEDEELLKRLRDLIREVRDRVRRLLEEDKDSLRRIRERVEELLRRSEESLKDLEKKIREG

SEQ ID NO: 15108 - protein, 55 aa, Artificial Sequence
  Synthetic
EELKKIADKVEEVLREVEKELDKSRRTSDEILKKVEKAVRDLDRRVKEVIDRARR

SEQ ID NO: 15109 - protein, 60 aa, Artificial Sequence
  Synthetic
SEAEELLKRLERLLRESKKDLERLRKELKDLLEESRKDVTRLLDEIRRLLEEIKRRLDKR

SEQ ID NO: 15110 - protein, 59 aa, Artificial Sequence
  Synthetic
EEVKRMIEKLKKESEEVIRKAKEDLDRVTKESRRVIEEVERRLDELRERLREVVERVKT

SEQ ID NO: 15111 - protein, 60 aa, Artificial Sequence
  Synthetic
DEAEKLLKELRDLLEESRKDLERLLKELEDLLEESKRDLERLLEEITELLKRIKETVERR

SEQ ID NO: 15112 - protein, 59 aa, Artificial Sequence
  Synthetic
EEVKRKIDRLEEESRRVIEEARKRLEEVEEKSKKIIDDARRALDRIDKELRRVVEETRK

SEQ ID NO: 15113 - protein, 60 aa, Artificial Sequence
  Synthetic
SVEETARRLLDENRKLLEEAERIHTEINERNKELLKRADDLHRRVLEDLRKLLDKVAKEI

SEQ ID NO: 15114 - protein, 56 aa, Artificial Sequence
  Synthetic
ADTVVKRIKKVIDELEELNRKSKKELKEVIEDLERRNRDSIRRAEDLLRRLEEEVR

SEQ ID NO: 15115 - protein, 60 aa, Artificial Sequence
  Synthetic
KDEETVEKLLRELEELLKEAEERAKDLNRRNKELLDEADRRHEELLRRLEDLLRDVRRRI

SEQ ID NO: 15116 - protein, 56 aa, Artificial Sequence
  Synthetic
SDTVSERIRKVIREIERLIKEIVKEIEKLIRDLEKRNRESLKEIKDLLKKLKDEVD

SEQ ID NO: 15117 - protein, 60 aa, Artificial Sequence
  Synthetic
SRKEKLLTELKEILKRLKEEVEKIVKESEKSIEEHHRRSERLKRESKKSLDDLAKILERS

SEQ ID NO: 15118 - protein, 55 aa, Artificial Sequence
  Synthetic
EELEKIRREVEELLRRAEEELRRLNREIEENHKRVKRELEKIDKEMKDLLREAKR

SEQ ID NO: 15119 - protein, 60 aa, Artificial Sequence
  Synthetic
DRKERLKERLERLLKEHHDRSRELLRTSEESIRRHHEESRRLLRRSKESLDRLRDELRRL

SEQ ID NO: 15120 - protein, 55 aa, Artificial Sequence
  Synthetic
EELRKLERRARENHKRVREALERLNRRIEENHKRVRRRLEDLDRAAEELLREAKR

SEQ ID NO: 15121 - protein, 59 aa, Artificial Sequence
  Synthetic
SRKEDLKRRLEEIIKRLEEVVRRILRTSEESLKDHHEASKRLLEESEKSLKRLEEELKR

SEQ ID NO: 15122 - protein, 55 aa, Artificial Sequence
  Synthetic
EELRKIEERIRELAKRAREELDKLDKEVRKNHERVKRRLEELDRRAKELVREERR

SEQ ID NO: 15123 - protein, 60 aa, Artificial Sequence
  Synthetic
SEKEKLLKEIERLIEELRRVVKKAVEDSKESIDRHHERSRELLRRSRESLKDLERRLKDS

SEQ ID NO: 15124 - protein, 55 aa, Artificial Sequence
  Synthetic
RELEELEKRVRELERRIRETLTRLNEEIEKNHRRVEERLRDLNREAEKLAEEAKR

SEQ ID NO: 15125 - protein, 60 aa, Artificial Sequence
  Synthetic
SEKEDLSRRLAELLKEHHDRSKKLLDESRDSLRKHHKASRDMLRRSDESLKRLDRVRKER

SEQ ID NO: 15126 - protein, 55 aa, Artificial Sequence
  Synthetic
EELDRIRKEVKKNHDRARRALEKIDKEAKENHERVREALRKLNEDLEKLEREKRK

SEQ ID NO: 15127 - protein, 60 aa, Artificial Sequence
  Synthetic
REKEELIKRLKRLIDELRRVVKTLLADLERLLKEHHDRSRRILEESKRSLEELEKTLRRS

SEQ ID NO: 15128 - protein, 55 aa, Artificial Sequence
  Synthetic
DELRKLKEELEDLARKARKEIEDIKEKLRRNHERVKKALEDLNRTAEELLDRARQ

SEQ ID NO: 15129 - protein, 59 aa, Artificial Sequence
  Synthetic
SREEKLLKELKDIIDTLRRRVEEILTESEKSLRDHHRESRKIVEELRKLLEDLRRLLER

SEQ ID NO: 15130 - protein, 55 aa, Artificial Sequence
  Synthetic
RELDKIEEEARELVKRAEEKLREIDKRARDNHKRVRDELKRILDELKKLIDERRK

SEQ ID NO: 15131 - protein, 61 aa, Artificial Sequence
  Synthetic
SVEDSIDKIDKELEKNSERTKRTIDRIREESRRLIEEIKDRVRRLLREAERTIEDVKRKLK

SEQ ID NO: 15132 - protein, 59 aa, Artificial Sequence
  Synthetic
RRVVEELRERLKRLLEKHHDLMRRLTEDLKRLLEESERDARRLVKELEDALREIREDTR

SEQ ID NO: 15133 - protein, 59 aa, Artificial Sequence
  Synthetic
SREDKVRELEERLKRLNERLNREVKKVNEDNRRLLKRAEDTARRLAERIRRLLERVDRE

SEQ ID NO: 15134 - protein, 56 aa, Artificial Sequence
  Synthetic
DEELERRVEELLKRNEKLIREVKKRLEELLRRNEELIRRILEEVEKLLKDLEDKVR

SEQ ID NO: 15135 - protein, 60 aa, Artificial Sequence
  Synthetic
RREERVKEALERIRRLNKRINERVEEVNRENKRLLDEAKRTHEELEKEADRLLDDVRRKI

SEQ ID NO: 15136 - protein, 56 aa, Artificial Sequence
  Synthetic
EEELEKEIRKVLETNRKLAEDVRRDLERLLRRNRRLIEESKKEVEKLLKELEEDVR

SEQ ID NO: 15137 - protein, 60 aa, Artificial Sequence
  Synthetic
RRDDKVRKLEKELRDSNRKANDESKKLRDELRRLNEEANRRVRELERRIERLLEKVKDDI

SEQ ID NO: 15138 - protein, 56 aa, Artificial Sequence
  Synthetic
EEELKKRVEEALEEHRRLVEEVRRRVERILERNDELIKRIEETVEDLLRRLEEEVR

SEQ ID NO: 15139 - protein, 61 aa, Artificial Sequence
  Synthetic
SEIDEIVKEVERLLEKLKEDSRRTVEEVKKLLDELRKHSEDSVREIEELIERLRREIERDG

SEQ ID NO: 15140 - protein, 56 aa, Artificial Sequence
  Synthetic
EEKLRRLEEELREILKRSEDLARKLDEDLKRILERTRREIKRLEEDLDRLDEEVRR

SEQ ID NO: 15141 - protein, 61 aa, Artificial Sequence
  Synthetic
SESDEIIKEVDELIKRLRKHSKETVKEIEEILTRLEERSRKSVKEIEDEIRKLEDIVRKRG

SEQ ID NO: 15142 - protein, 56 aa, Artificial Sequence
  Synthetic
EEKARTLERKLDKILEETKREAEELKKRLDELVEKTRRLIEELKRRLKELLDRAET

SEQ ID NO: 15143 - protein, 61 aa, Artificial Sequence
  Synthetic
DESRKIVRDVEELIKRLEEHSRETVKRADRVLREDHKKSRDSVREIEKLIRDVKDKIDKRG

SEQ ID NO: 15144 - protein, 56 aa, Artificial Sequence
  Synthetic
EEEVRRLKKELDDLLEETKDLIRRLEEKLDKNVKETEDEIRRLIEELKKILEDATR

SEQ ID NO: 15145 - protein, 61 aa, Artificial Sequence
  Synthetic
REIDEIVKEIEKILRELKKRSDETVREIERLIEEDHRKSRKSVRDIEKLIDDLRKDVERRG

SEQ ID NO: 15146 - protein, 56 aa, Artificial Sequence
  Synthetic
EEKLRKLEEELRRLLEESKREADRLKKELRDNLKTTDELIKELKERLDKLKEDIER

SEQ ID NO: 15147 - protein, 61 aa, Artificial Sequence
  Synthetic
DESDRIVEEVRRLIKTDHDNSRRSVRKIEELIARDHKKVKEIVDEIRRLIRELEELIRRDG

SEQ ID NO: 15148 - protein, 56 aa, Artificial Sequence
  Synthetic
KEKLDRLEEEIDKNVKRTREEIERLKRELDKNLEDVRRLAKELEDELRKLDEDAKR

SEQ ID NO: 15149 - protein, 61 aa, Artificial Sequence
  Synthetic
SEIDRIIEDAERLLRELERNSDRSVEEIEKLIRDDHDNSRRTLEKIEKVIRELRKDVKDRG

SEQ ID NO: 15150 - protein, 56 aa, Artificial Sequence
  Synthetic
REKVKRLEEELRKILKKTREKAEELKRRIDRNVEETRRRARELKEELDRLLKEART

SEQ ID NO: 15151 - protein, 59 aa, Artificial Sequence
  Synthetic
DESRKVIKEIEDLLEEWKRRSERMIRESEKLIEELRERVDKILEDIDRLIRTLDELRKA

SEQ ID NO: 15152 - protein, 56 aa, Artificial Sequence
  Synthetic
EEEAKRLKDELEEILKESEDLSRRTKKELEDLLREVEKEIKKLEDKLKKLLDETDK

SEQ ID NO: 15153 - protein, 59 aa, Artificial Sequence
  Synthetic
SETEKVIREIEKLIDDIRKESERSIEESRKLLKELEEIVEKAIRDSRRLLEDLRRLVED

SEQ ID NO: 15154 - protein, 56 aa, Artificial Sequence
  Synthetic
EEKADTLRRKLEKLLEDTKRMSEKTKKEIEDLLKRVRELSEETKRRLDRILEDVER

SEQ ID NO: 15155 - protein, 59 aa, Artificial Sequence
  Synthetic
SESDKVVKEIEELLRELRKRVEEIIRESEALIETLKKRVDDAVRESRKLIKDLRELIER

SEQ ID NO: 15156 - protein, 56 aa, Artificial Sequence
  Synthetic
REKAKKLREELRKLMEEVRRLSKETKDKLDELLKTVEELSKELRERLKRLLDEAET

SEQ ID NO: 15157 - protein, 59 aa, Artificial Sequence
  Synthetic
SESDEVAKRIKELIDRLEERSRRSIRESDRLIKELEKEIEKAVRESEKLIRDLEELIRR

SEQ ID NO: 15158 - protein, 56 aa, Artificial Sequence
  Synthetic
EEKMRTLEEDLKRLLEETRDMSRKTKEKLEELLKRVRDLSKKLAEDLRRLLEEVRR

SEQ ID NO: 15159 - protein, 59 aa, Artificial Sequence
  Synthetic
SETDEVIKTLEELLERIKRRVEELVKRNKDLIKALEEEVRRIIKESKKLIDDLAELAKE

SEQ ID NO: 15160 - protein, 56 aa, Artificial Sequence
  Synthetic
KDKADRIREEIRKLEEEVKRLHDELKKELDDLLRRVEEDSKRTKERLRKLLTDVKK

SEQ ID NO: 15161 - protein, 60 aa, Artificial Sequence
  Synthetic
SEVDDLIRRLEKLLEDIKRRVEELVRRDEKITKDWERESERLIRELEELLKTIADLVRRR

SEQ ID NO: 15162 - protein, 56 aa, Artificial Sequence
  Synthetic
KKKLDEIRKRLEEILKRVRELLERLDRENEDLARKSKELADRIRKELKRILDEVRR

SEQ ID NO: 15163 - protein, 60 aa, Artificial Sequence
  Synthetic
DEVDELVKELEESLRRSREEIERLVREDEELTKTIREEVKKLVKTDEDLSKKIEDTVRRR

SEQ ID NO: 15164 - protein, 56 aa, Artificial Sequence
  Synthetic
KDKIKELKERNDKLLEEARRLAKELKERNDTLLKEVREELRRLRERNDRILKEAKK

SEQ ID NO: 15165 - protein, 60 aa, Artificial Sequence
  Synthetic
DEVDKLIRDLEELIRRIRKRLKELVDRDRELTREIRRRIRELIEESKEALERIDKRVKER

SEQ ID NO: 15166 - protein, 56 aa, Artificial Sequence
  Synthetic
KDKIKKLKDDLDRLLKEAEDRLRELEERNKRLLDEARKEIEKSDRRLEEILERVRR

SEQ ID NO: 15167 - protein, 60 aa, Artificial Sequence
  Synthetic
DEVDELIKTLKKLLEDIRERVERLVTDSKRSLDEIRETVRDLVRRDKELLKRIEDTVRER

SEQ ID NO: 15168 - protein, 56 aa, Artificial Sequence
  Synthetic
KDKLEKIKRDLEKILTEVREALRELDERLKKLAEEAKRLLEELRKRNRDILEKVRK

SEQ ID NO: 15169 - protein, 60 aa, Artificial Sequence
  Synthetic
DEVDKLIKEIEESLRRSEKEVRDLVRESERSLKEIEKRVRELVKRDEDLLKEIEEVVRKK

SEQ ID NO: 15170 - protein, 56 aa, Artificial Sequence
  Synthetic
EEKLKRLRKENKDLRDRVEEELRRLDKELDELLETVRRLLDELRKRNKKLLDEARK

SEQ ID NO: 15171 - protein, 60 aa, Artificial Sequence
  Synthetic
RLEEEIERLRREVEELIERSKDLIRRSHTKSRKLIEDVKRELDRLRREVEELIKRAEDRT

SEQ ID NO: 15172 - protein, 55 aa, Artificial Sequence
  Synthetic
DRVVREAEKLIRKIAEDNRKALEESDELIRRSEKDVRDMVRRAEELIEEIKRRVD

SEQ ID NO: 15173 - protein, 59 aa, Artificial Sequence
  Synthetic
SKDEEVERLKEELDRLLEEVRRLSEESKKRNDELLKRAEEIIEELKKELDEIREEVERR

SEQ ID NO: 15174 - protein, 56 aa, Artificial Sequence
  Synthetic
KDTVVRRAKKVIDELRKDVERVKRESDEVLKELEKLNREIEREVRKLLKELRDTVR

SEQ ID NO: 15175 - protein, 59 aa, Artificial Sequence
  Synthetic
RSEEEARKLERENKKLVDDARKLSEESRRRNDKLVEEARRIAEELKRELDRLLEEVDRR

SEQ ID NO: 15176 - protein, 56 aa, Artificial Sequence
  Synthetic
TKTVVDRVKKLLDDLREVNREILRESDKVLRDLKRLNDEIKREVEELLERLEREVR

SEQ ID NO: 15177 - protein, 59 aa, Artificial Sequence
  Synthetic
SAEEDAERMKDRNRRLLEKVRRLSEESKRRNDKLVEDAKKLSEDTRRKLEDIARKVRKR

SEQ ID NO: 15178 - protein, 56 aa, Artificial Sequence
  Synthetic
KDRVSEEIDRLLRDLERRNREILKESKEVLDRLKKLNEEILKESEDLLRRLEEEVR

SEQ ID NO: 15179 - protein, 60 aa, Artificial Sequence
  Synthetic
SEIEKVVKDVDKLLKELEDHTRKSLEDSKRLLDELRKHTEDTSREVKELLERLEEVIRRN

SEQ ID NO: 15180 - protein, 56 aa, Artificial Sequence
  Synthetic
KEDADRLRERLDRILEESERLSRETKEELDRLLEDSKRKIRELEERLKKLLDDAER

SEQ ID NO: 15181 - protein, 60 aa, Artificial Sequence
  Synthetic
DDSDKVLKELEKLLEDLERHTRESLRESDELLKELKEHTKTTLRRSERLLRELKRLVDEN

SEQ ID NO: 15182 - protein, 56 aa, Artificial Sequence
  Synthetic
EKDVEEVRRKVEELLKDSERLSKETKERLRDILRDSRRLSRETKEELKRILKEVRD

SEQ ID NO: 15183 - protein, 60 aa, Artificial Sequence
  Synthetic
RESEEVIKEVEKLLEELKENTKRTLKESRDLLKTLEDHTRETKKTVEKMLKELEDKVRKR

SEQ ID NO: 15184 - protein, 56 aa, Artificial Sequence
  Synthetic
EEEADRLRRELKKILDRSRELSRKTKEDLKKLLKESEDIIRELDRRLEEILKEVER

SEQ ID NO: 15185 - protein, 60 aa, Artificial Sequence
  Synthetic
EEIERVIKEVKDLIEELRRNTERTLRESEELLKTLKKISDDSKEEVERMLRELRELVKSN

SEQ ID NO: 15186 - protein, 56 aa, Artificial Sequence
  Synthetic
KEDADRLRREVDKLLEESKRLSEETKRELDRILEETKRTLERLKEELDKILEEVER

SEQ ID NO: 15187 - protein, 60 aa, Artificial Sequence
  Synthetic
SEKEKLVEEVRRIIERHKRVTEELLKELRRILKEWEDVSRDIERRVREILERLERAARDG

SEQ ID NO: 15188 - protein, 55 aa, Artificial Sequence
  Synthetic
KDLEELKKELEDSARRSKKLADDVREELKTLLRESERIIKELRKELEKLLREVEK

SEQ ID NO: 15189 - protein, 60 aa, Artificial Sequence
  Synthetic
TLEEVLKEVKRRVERVNEEDKRVLDESRKRAKEINDEDRRLLEESKRKAEELLERLRRKD

SEQ ID NO: 15190 - protein, 56 aa, Artificial Sequence
  Synthetic
EDRLRREAERILREIRELSRELKRKNEELLRTIRRVSEELRKKNEEILERVDREIK

SEQ ID NO: 15191 - protein, 60 aa, Artificial Sequence
  Synthetic
SAKELLDDLRKKIEDNVRETEKLLRRLREKVEKIEREIKELVRKLREDLERLLEKVKRRG

SEQ ID NO: 15192 - protein, 55 aa, Artificial Sequence
  Synthetic
KEVVDTVRELIERDHKKSRDSVRRVDELIDRARKDVRRVVEEVRKDLEKLDEDVK

SEQ ID NO: 15193 - protein, 59 aa, Artificial Sequence
  Synthetic
REVEEVLKDLKRLIDEAKKRVEDAIREIDRLIREWERLNREMLREIKKSNDEVRELVKA

SEQ ID NO: 15194 - protein, 56 aa, Artificial Sequence
  Synthetic
EEAVRDVERRLEKLLKEIKDLIDRLKEKVDRVKREVERSIEELKRHNEEVLKEVRK

SEQ ID NO: 15195 - protein, 59 aa, Artificial Sequence
  Synthetic
KEVEDVLEELDRLIETWARLNRELVERIRRLLEEWREENRKVVEEVRRSNETLRELVER

SEQ ID NO: 15196 - protein, 56 aa, Artificial Sequence
  Synthetic
EEVVRRVKDKLREVKREVEETARELRERVDDLLRKVEESVTRLKRHNEDLLREVER

SEQ ID NO: 15197 - protein, 59 aa, Artificial Sequence
  Synthetic
SEVEEVLRDLKRLLEEWKKRNEDLVRDVERLLREWKEANDRALKKSRDSNKELERLARD

SEQ ID NO: 15198 - protein, 56 aa, Artificial Sequence
  Synthetic
KEMVERVRREIKRLEEEVKKTITDLKERLKKLKEDADRSSRESEEHNKKVVEDVRR

SEQ ID NO: 15199 - protein, 59 aa, Artificial Sequence
  Synthetic
REVEEVLKELDRLIDELRKEVEKIVREVERSNDEWRRRNKELVDEVRRELDRLRKLVDD

SEQ ID NO: 15200 - protein, 56 aa, Artificial Sequence
  Synthetic
KEVVDDVKRKLEDLKRRVDELVRRLEEHNKDLRRKVEESAKDLRRKLEELRERVER

SEQ ID NO: 15201 - protein, 60 aa, Artificial Sequence
  Synthetic
SEKDEVRKTIERLLKEVEKMIRRVLKEVEDLLRELKKRTEKLKRELDESHRRVKEVIERR

SEQ ID NO: 15202 - protein, 56 aa, Artificial Sequence
  Synthetic
RELLEEVERALKKLKEDVDKVIEELREKLKRHHEDVKRAIDRVREESKRLKDEAEK

SEQ ID NO: 15203 - protein, 60 aa, Artificial Sequence
  Synthetic
REDEEVVKTLRELLREAKERTDRLLRELREIIKTMRKRLRDIEEDLRRSHREIEKLIRDR

SEQ ID NO: 15204 - protein, 56 aa, Artificial Sequence
  Synthetic
RELLEEVRKELERHHREARRAVEEVKKLIDDLMREVRKLIDEVRKDSERLRREVER

SEQ ID NO: 15205 - protein, 60 aa, Artificial Sequence
  Synthetic
DEDEEVKRRLEKLLEDADRVTEKIRKDLKETHDRVKRAIDELKKELEKSHRTIKEVIERR

SEQ ID NO: 15206 - protein, 56 aa, Artificial Sequence
  Synthetic
RELVEEVRDRLRKHHKKVRDIVDDVDKRSKDLERTARRVIEDVKEKSDRLKEEVDR

SEQ ID NO: 15207 - protein, 56 aa, Artificial Sequence
  Synthetic
EDEERVKEKLKRLLEKAEEALRRSKRRNEENKKEHERVLKEIDERLKRLEEKVRRG

SEQ ID NO: 15208 - protein, 56 aa, Artificial Sequence
  Synthetic
REDIERLLKELDDRIRRIIEELKRSDEELHKENRRKIKELEDLVREADKRIEDKRK

SEQ ID NO: 15209 - protein, 56 aa, Artificial Sequence
  Synthetic
DDEKEIKDRLDDNKRKDDEMTKRAEDELRKNLETTKEALRDIKRKLDRLREKVERN

SEQ ID NO: 15210 - protein, 56 aa, Artificial Sequence
  Synthetic
REELEKIVRDLHKRNKEVIDDIRRLIDELHKRDRETIKRLEEIVRRADEKIKEKAR

SEQ ID NO: 15211 - protein, 56 aa, Artificial Sequence
  Synthetic
SDEERIEERLKRNEETDKRATDENEKRNDDLLRRAKEALDRNRERNDELRDKVRKE

SEQ ID NO: 15212 - protein, 56 aa, Artificial Sequence
  Synthetic
REELSKLVKELHDDNREKIKDSDRSDDDIRREIERMIRETNKSDEDIARAIDESAR

SEQ ID NO: 15213 - protein, 57 aa, Artificial Sequence
  Synthetic
SERERVEERLKELAKRVEDAIRRLKKDLERTKEEHKEADRRVKEKLKRLKEEVDRAN

SEQ ID NO: 15214 - protein, 56 aa, Artificial Sequence
  Synthetic
DTEVEELLKDVKRKIEEMIKELKRLNDELNKRSEEMIRRNDDLIKRLEEEIRKDSK

SEQ ID NO: 15215 - protein, 59 aa, Artificial Sequence
  Synthetic
SSEDEVRKTVDELRERSERTIRDLERVDRELKKEHEELIKELREIVKELREKVKRASKE

SEQ ID NO: 15216 - protein, 55 aa, Artificial Sequence
  Synthetic
KRIEEELRKLHKENKEAVERSERTNRDILRRNDEADKEIEKELRELIEKLERDRK

SEQ ID NO: 15217 - protein, 57 aa, Artificial Sequence
  Synthetic
SEKEDLKEKLKRNEEEHRRAVEEIRKRLDENRRRHEKVIKEIEDALKKDEDDVDKEN

SEQ ID NO: 15218 - protein, 56 aa, Artificial Sequence
  Synthetic
KDELTREIEKLHRTNREMVRDLRETLKRLHEENKRLVDELRRLLEELHRRTREASR

SEQ ID NO: 15219 - protein, 57 aa, Artificial Sequence
  Synthetic
SEEEEVRKALERLRRELKRVLERSEELLKEWEDRLRRVLEESRRLLERWREELEKDG

SEQ ID NO: 15220 - protein, 56 aa, Artificial Sequence
  Synthetic
REELKEILKRLEDTLREIEKEAKRLNDELARVLEEIRRKSERENRRLKELIDRLRK

SEQ ID NO: 15221 - protein, 57 aa, Artificial Sequence
  Synthetic
SDRERLEEMLKRLKEELEKVRRDNERSLEEIKRSVDRVLEEHKRTLEELKREVDRAN

SEQ ID NO: 15222 - protein, 56 aa, Artificial Sequence
  Synthetic
GEEADEVVKRLADVLEKAREDLKRSDKRLRDSNRESRKELEKINRDLRRKLEEAKR

SEQ ID NO: 15223 - protein, 57 aa, Artificial Sequence
  Synthetic
KDEERLETVLREIETRAEKVARDHRDSLRRIREELERVLKENKDTLKRIREELEKTN

SEQ ID NO: 15224 - protein, 55 aa, Artificial Sequence
  Synthetic
EEVKRVLKELRDLLEEIRKRLEDINRDLKRKLDEIEEELRRSDEKLKRDLEEARK

SEQ ID NO: 15225 - protein, 56 aa, Artificial Sequence
  Synthetic
SDEDKLREDLRRLEEELKKVLDDHRKSLKEIEDSLRRVLEENKRTLEKLKRDAEKA

SEQ ID NO: 15226 - protein, 56 aa, Artificial Sequence
  Synthetic
GEEAKKVVKALEDVLREIRERLKRINDELRERNKKSSDELRKSDERLKRELDKMRK

SEQ ID NO: 15227 - protein, 59 aa, Artificial Sequence
  Synthetic
DADKELEKLLREWEKRSEELRKRLEDINRRWEEESKRLKKELKDINADLRRKVEELRRD

SEQ ID NO: 15228 - protein, 59 aa, Artificial Sequence
  Synthetic
SDVIRRAKEELDRIEKKDRDVLDDNRRLIETWRREDKKVNDDNRRSNEELKRELDKTRE

SEQ ID NO: 15229 - protein, 59 aa, Artificial Sequence
  Synthetic
SAEEELKELLERWDRDSKRAEEELRRLLEESRERSEKVLRDLKRLLDEMEDAVRKLKRD

SEQ ID NO: 15230 - protein, 59 aa, Artificial Sequence
  Synthetic
SEVIERFKDVLRRIEKRNKEVIDRAKEVIDEDEKRNREVIERVERKVERLRKEVEDREK

SEQ ID NO: 15231 - protein, 63 aa, Artificial Sequence
  Synthetic
EEKERMREVLKRLEEEAKKVLDDNRRAVEEIEKKDREVHKRNRDLLERWREEMEEILRKARER

SEQ ID NO: 15232 - protein, 56 aa, Artificial Sequence
  Synthetic
EEELKKIIERAREELEKVRRELEEHLKRWDEISKKLSKDLERHNEEVARTLKRSRD

SEQ ID NO: 15233 - protein, 60 aa, Artificial Sequence
  Synthetic
SVLEEFKKRIEELHRRDRKVLEDHRRRLKEWEEELKRVLDEHRESLKRIKERVDRVKKDL

SEQ ID NO: 15234 - protein, 56 aa, Artificial Sequence
  Synthetic
SDALRELLREWDKLSKELEKELRDLNREVERSIREAKKKLEKANEEMRRTLEKDRK

SEQ ID NO: 15235 - protein, 60 aa, Artificial Sequence
  Synthetic
STEEDAERALEELKEELRRVEKENRDSLKRIREKLKEVEDEHRKTLEELKKELDDVMRKI

SEQ ID NO: 15236 - protein, 56 aa, Artificial Sequence
  Synthetic
KDSLKRLLDEARKKLEELKRRLEKLDRDLDESLKRLKEDLDRLDRELRRLLDELDK

SEQ ID NO: 15237 - protein, 60 aa, Artificial Sequence
  Synthetic
SVEEEARKALDDLRRRLEEVTRRHRESLKELREELDEVRKENEKSLKKIKDDLEAVRRRI

SEQ ID NO: 15238 - protein, 56 aa, Artificial Sequence
  Synthetic
EEELRRLLKKLEDDLRRLKKRLDELDRRLRELVKRLLEDLKRLDDELKKLLEETER

SEQ ID NO: 15239 - protein, 57 aa, Artificial Sequence
  Synthetic
SAEEELKRLLEEHKKESEDVKRRLRDLLRELEDIHRRMTERLRELLKRLDDILRRRN

SEQ ID NO: 15240 - protein, 55 aa, Artificial Sequence
  Synthetic
EEILKKLEEISRRVREKVKKELDELKELIRRHARKLEKILEEIRRLIEDLERRAR

SEQ ID NO: 15241 - protein, 61 aa, Artificial Sequence
  Synthetic
SEAEEVLKRIRDILETLRREHERILKEIRELNEEFKKEVEKALRKIKRELEELEKDAEREG

SEQ ID NO: 15242 - protein, 59 aa, Artificial Sequence
  Synthetic
ERVEKKIEELLREIRKVNDEVHKRIRKLLEDHRRTVDEARRRIEELLRRLKKTLDDIDK

SEQ ID NO: 15243 - protein, 57 aa, Artificial Sequence
  Synthetic
SDKDELKRLLDDHERTSTRARESLEKLSREHRKTSREVEERLKRLVDAIRDTARRVD

SEQ ID NO: 15244 - protein, 59 aa, Artificial Sequence
  Synthetic
EEVVRRILRELRELNERAKEMLERILRKLEELNREYKKKVREILERIKELLRDLRRKAN

SEQ ID NO: 15245 - protein, 61 aa, Artificial Sequence
  Synthetic
SADDEIRKLKKEAEDILRKAREDRERLKEKNRKIDEDMRRTLKKLHEETRELEKKVRREKG

SEQ ID NO: 15246 - protein, 55 aa, Artificial Sequence
  Synthetic
EELVKEIRELLRRLEEKIEELRRRYEKKLEELKRKVDELIRRYKRKLERVAEEVK

SEQ ID NO: 15247 - protein, 60 aa, Artificial Sequence
  Synthetic
SEEEELVRRVEEKIKASEKHARELVEETRKKLDESRKKWKDLARRSRRLLEELKDKVDKG

SEQ ID NO: 15248 - protein, 55 aa, Artificial Sequence
  Synthetic
EELRRLEKELRDLNKRVKEESRKLEEDLKDIHERAKEDSKRLKRELEKIKEEVER

SEQ ID NO: 15249 - protein, 59 aa, Artificial Sequence
  Synthetic
DAERILRELEERLKRLLDEHREISKELRKRNKDLLKEHKERSKRVKEELKELVKEVEDG

SEQ ID NO: 15250 - protein, 56 aa, Artificial Sequence
  Synthetic
IEELVKEVEKLIKELREKSREVEREVDKMIRDNARKSEKIVRDAKRLLEKLEREVR

SEQ ID NO: 15251 - protein, 59 aa, Artificial Sequence
  Synthetic
RSEDILRELRERVKRSEERHEKISRDLERKNRELLKEHRERSEKLKRELEELVKRVEDR

SEQ ID NO: 15252 - protein, 56 aa, Artificial Sequence
  Synthetic
AEDLARRVDETIKDHERHSEEVKRDVTEKIKENEKLSRDIVRRVEKLLRDLEREVR

SEQ ID NO: 15253 - protein, 59 aa, Artificial Sequence
  Synthetic
SREDILRDLRRRLEELLRRHKRISDELRKRNKKLLDDAEKRAKELREELEKLVREAERR

SEQ ID NO: 15254 - protein, 56 aa, Artificial Sequence
  Synthetic
IEELVKRVDKLIKELKRKSEEVMKRVDELIRRNERLIREIVKEVEKLLEDLEREVR

SEQ ID NO: 15255 - protein, 59 aa, Artificial Sequence
  Synthetic
SAEETIERLKEEIEKLLREAEEILRRLRERNRRLLEEHKDISRKLEEELRKLMEKVRRG

SEQ ID NO: 15256 - protein, 56 aa, Artificial Sequence
  Synthetic
VEELVRRVRELIKRLRDMAKEIEERVDETIRRNRRLSEKVARDVERLLRELEERVR

SEQ ID NO: 15257 - protein, 59 aa, Artificial Sequence
  Synthetic
DAERILKELEERLDRLSEEAKKILDELRRENEELLREHDERVKKLKEDLKRLEKKVEDG

SEQ ID NO: 15258 - protein, 56 aa, Artificial Sequence
  Synthetic
VEELVKRVTKLIEDLRRLAKKISDEVRKLIEENRRASKRVEDEARELLKRLEDAVR

SEQ ID NO: 15259 - protein, 56 aa, Artificial Sequence
  Synthetic
SEIEKMVKDVRDLLKRLKDEVKKISERWEDSLRKLKKRSEDTVKRVKEILEELRRR

SEQ ID NO: 15260 - protein, 56 aa, Artificial Sequence
  Synthetic
RDALRELERELDKLRKEIKKELDRLRKENREVNERHKELSKRLEEELERVKRELDT

SEQ ID NO: 15261 - protein, 57 aa, Artificial Sequence
  Synthetic
DEVRELVKTVKKVLDDIRREVEETLRRYEKLVEDLKRRSDKSVKDVDDEIKRAEEEG

SEQ ID NO: 15262 - protein, 56 aa, Artificial Sequence
  Synthetic
EELIKRLREEAEKLIRRAKEEHERLEEESKRLLEENEELLDRLDKKVRTLLDKLEK

SEQ ID NO: 15263 - protein, 60 aa, Artificial Sequence
  Synthetic
SEEDRVRETVKKLLEDHRRKTEKVTEDVRRLLKENREKVEDAVDKARKLLKRLEELRREG

SEQ ID NO: 15264 - protein, 55 aa, Artificial Sequence
  Synthetic
EKLKRIEEELRKSRERTKRLLEEIRKELEDSKKEVEDLLRRLREELKRLKDEIER

SEQ ID NO: 15265 - protein, 63 aa, Artificial Sequence
  Synthetic
SEVEELVKRAEELIRELKKLSEDSVRELEKLLDEYRKTTEKLKRELEELLKEVEDVVRKLRDQ

SEQ ID NO: 15266 - protein, 56 aa, Artificial Sequence
  Synthetic
EKLLRKIEEDVRRLKETNERLLKRVDEELKRLDEESRRVLKEAKERLKELKDRERK

SEQ ID NO: 15267 - protein, 57 aa, Artificial Sequence
  Synthetic
DEVEKVLDELEKVIREVEERIKTTNKRLREVVERVERRIDKSDRELEEMIERVERKL

SEQ ID NO: 15268 - protein, 56 aa, Artificial Sequence
  Synthetic
SEEVRKEVRRLDKRVKEIVEESRKLVKELAERVEEIVEESKRLVEKLAREVDETRR

SEQ ID NO: 15269 - protein, 57 aa, Artificial Sequence
  Synthetic
SEIEKALKEAREAIEDAKKKIDDTDRENEKASRDAERRIDKSDKEAEEAVRRAEEEA

SEQ ID NO: 15270 - protein, 56 aa, Artificial Sequence
  Synthetic
KDEVTKAARKAADDAREAAERSRKLAEENARRAKKAADDSRKLARELAKEAKKAAD

SEQ ID NO: 15271 - protein, 57 aa, Artificial Sequence
  Synthetic
KELEDVLDTVRRAIERVKRESKKINDELEKELKKVKDELDKSHEEVRRAVEDVARKL

SEQ ID NO: 15272 - protein, 56 aa, Artificial Sequence
  Synthetic
VKDIEKLVRDVVRRAEKVVDDDRKLVRDIVRDAKRVVRDSERTVRDIVKKADENTK

SEQ ID NO: 15273 - protein, 57 aa, Artificial Sequence
  Synthetic
SKLEKILKDLERAVREVARELERTHRELEEAVKKVKKRLEDTNRRLTEALKRVKDKL

SEQ ID NO: 15274 - protein, 56 aa, Artificial Sequence
  Synthetic
VSEIKKLVDDIVRRLRKVVKDSEREVREIMKRADDVVRTSEKTVEDIVKEAEDDAR

SEQ ID NO: 15275 - protein, 57 aa, Artificial Sequence
  Synthetic
SELEEAAKRAREAAKKAKEALKRSLKEAEDAAREAEEDLKRSNDKNRKATREAEERA

SEQ ID NO: 15276 - protein, 56 aa, Artificial Sequence
  Synthetic
AEEAKKAADDLARKAKEAADESKRLSEELAKKAKEAAKTSDKLAKENAEEAKKAAK

SEQ ID NO: 15277 - protein, 57 aa, Artificial Sequence
  Synthetic
DELERVLEDLKRVMEEVERKLRESNKELEKAVRRVEELLKRSNEKNRKVTREVREKA

SEQ ID NO: 15278 - protein, 56 aa, Artificial Sequence
  Synthetic
AKDVEDLVRRLMEKLERIVEESERLSDELRRRAEEVVKTSEDLVRENAKRVDDAAK

SEQ ID NO: 15279 - protein, 57 aa, Artificial Sequence
  Synthetic
DELEEIEKKLRDVVREVEEKLRETNRRLREVVKRVEERLKKSNEDLRRAVRKVEESV

SEQ ID NO: 15280 - protein, 56 aa, Artificial Sequence
  Synthetic
AKDVEKLVKELMEEAEKIVEESRERVDRLMKRLDDIVRESERLSKELADRADEVEK

SEQ ID NO: 15281 - protein, 58 aa, Artificial Sequence
  Synthetic
RELEEILRTLEEMIERVKEKHERSKRELEKVITEVKEELRRSNEELRRVIEEVERKLG

SEQ ID NO: 15282 - protein, 56 aa, Artificial Sequence
  Synthetic
VDEVRKVVEDIVREAEKSVRENEELVKAIMRELKRVVKEAEELSEEIVRRLEERTR

SEQ ID NO: 15283 - protein, 61 aa, Artificial Sequence
  Synthetic
KELEDVKRRLEKVHRDVNEASKEIVTRLREVHKRANDESKKIIERLDTVLREVARRLADRR

SEQ ID NO: 15284 - protein, 56 aa, Artificial Sequence
  Synthetic
AEEVERRVRELEKDVRRLVEDIRRLVEELMRNAKEIVDTAEKLVRELERKLEEVVR

SEQ ID NO: 15285 - protein, 61 aa, Artificial Sequence
  Synthetic
DEVEDIIRRLEKFHREVNEESKRIIEELERVHREVNRKSEEIVRKLEKVLDEVREKAKRRS

SEQ ID NO: 15286 - protein, 56 aa, Artificial Sequence
  Synthetic
AEEVEEVVRRLVRHAEAVVERIERLVEELVRNAEKLVEEVKRKADRLVEEADRTVR

SEQ ID NO: 15287 - protein, 57 aa, Artificial Sequence
  Synthetic
DELEEVKRRLDEVNKRVEDEHRRVEEELRKVLEDVAREHEEVIKELERVLEKVRRAK

SEQ ID NO: 15288 - protein, 56 aa, Artificial Sequence
  Synthetic
SDEARKLVKENERRVEETVRRSEKLVRDAMKKAKDTVRRSAELVKELMDRVERVVR

SEQ ID NO: 15289 - protein, 57 aa, Artificial Sequence
  Synthetic
SEVEKVKKEAREMLKRVTDLLKEVNDRLKEVNKRVREEIRRVIERVREVLKRVAREV

SEQ ID NO: 15290 - protein, 56 aa, Artificial Sequence
  Synthetic
LEDLRRVVEELEKRARDVVEESRRLVDEDRKHVEDVVRRVRDVVRELEERAERITR

SEQ ID NO: 15291 - protein, 59 aa, Artificial Sequence
  Synthetic
SEVEKVVEENKKSVKTVRERVTELVKRNRDSVEEVKRRAEEMVRRNRKSVEEVRELLAR

SEQ ID NO: 15292 - protein, 59 aa, Artificial Sequence
  Synthetic
EEAKRRVDRVSEELEEVLRRVEEELRRVSKDLRRVLDEVKKEVDRVSEDLERVLRKDTT

SEQ ID NO: 15293 - protein, 60 aa, Artificial Sequence
  Synthetic
DEVDEIVRRIEEIVRESEEMAERIVRDIKRVVEKSRKDVEDNVDELRKIVEKVEETAKRT

SEQ ID NO: 15294 - protein, 59 aa, Artificial Sequence
  Synthetic
RDAERKVRDLLRDLERVNTEADEKSKKLIKELEKVNKEAEDKSRKLIKELEDVLREARR

SEQ ID NO: 15295 - protein, 60 aa, Artificial Sequence
  Synthetic
SSVDEIVKEAEKVVEDSREEAREIVERAEEIVRDSARKVDENVRRLEEIVRKVKEVADRT

SEQ ID NO: 15296 - protein, 59 aa, Artificial Sequence
  Synthetic
RDAERKVREVIERLKKVNDEVRKKLDELTRRLEDVNRKANERSTDLVRKLRRVLEEARR

SEQ ID NO: 15297 - protein, 59 aa, Artificial Sequence
  Synthetic
SADRKIEEMRKEIKRSTDEARRLVEELIRKIERSNEKVKRDVEKLIEDIRRVIRRVRED

SEQ ID NO: 15298 - protein, 55 aa, Artificial Sequence
  Synthetic
EELKKKLEDIVREDEKLVEELTRLAEDIVRRDTKLVRELLERAKRVVDRVREEVK

SEQ ID NO: 15299 - protein, 60 aa, Artificial Sequence
  Synthetic
DAEELVRELEERIKRSHERLEELLREVKRLIERSHEELKRLNEEVLRELDRVLDEVRKRK

SEQ ID NO: 15300 - protein, 55 aa, Artificial Sequence
  Synthetic
KDVVRELERIVKENSELAERVFREVEKIVRENTKLAEDSVRELKRLVEELKKRVK

SEQ ID NO: 15301 - protein, 59 aa, Artificial Sequence
  Synthetic
SDVEDVVRKLRELVKTNLKKVEDRVRKLKEEVEENVRRAEKIVRELEEEVERLLKLVAD

SEQ ID NO: 15302 - protein, 56 aa, Artificial Sequence
  Synthetic
REVAEEVERRLERSHRESRKLADEVRRALEKSNRKTRELLRRVDERVEEVREELDR

SEQ ID NO: 15303 - protein, 59 aa, Artificial Sequence
  Synthetic
SMEELVDKVEKELEESSRRSKELLDEVRRLLEESNKKTEDLLREVEELLKDVEREAEEK

SEQ ID NO: 15304 - protein, 53 aa, Artificial Sequence
  Synthetic
VVRDVERLVEENRERVKRIADEMRKLVKENEDRARDVVRRLRELVKRLRERVE

SEQ ID NO: 15305 - protein, 59 aa, Artificial Sequence
  Synthetic
KELEDIARDLERLLRENKKLIKEIVDRLRRLLEDNTRKVKKIVDEVKKLLDDLDKLRKD

SEQ ID NO: 15306 - protein, 56 aa, Artificial Sequence
  Synthetic
KEVADKVREDLERSNDEMRRVIEKIREDLRRSLKEAKERLDEIKERIDRLLDAARK

SEQ ID NO: 15307 - protein, 60 aa, Artificial Sequence
  Synthetic
KLEELLTEVRRRIEEVSRDLERVLREVEEDIKRTSDELDRVNRKVETEIKEVTERAEEKG

SEQ ID NO: 15308 - protein, 59 aa, Artificial Sequence
  Synthetic
EELVREVIERLKELVKKDKKLVEDVLRELKRLVDEDRKLVEDSLRRAKEIVDRARERVK

SEQ ID NO: 15309 - protein, 60 aa, Artificial Sequence
  Synthetic
SIEDVLREVERLLREVIERNRKVHEEVNERSREVERELKRVHDEANRESEEVIREAKRKG

SEQ ID NO: 15310 - protein, 56 aa, Artificial Sequence
  Synthetic
VEELERRAREIVKRVRELVDTHRENLERIVERAKELIKELEENLRDIVREIRERVR

SEQ ID NO: 15311 - protein, 58 aa, Artificial Sequence
  Synthetic
KEVEEVADRSRRVVEESKRRLDDVVRRVKEDSDRLRRDIERMVKRIKEIVKRVREEIG

SEQ ID NO: 15312 - protein, 56 aa, Artificial Sequence
  Synthetic
RKILKELLDRDRKSVKESEDEVKRLLDSNHELSRRIREELKRLLEKVKELVDRVRT

SEQ ID NO: 15313 - protein, 58 aa, Artificial Sequence
  Synthetic
KEVEDVKRKLEKIARDSEEALRRVVDELRKIVTESKKKLDKAVKEVKDDSKRVEETIG

SEQ ID NO: 15314 - protein, 56 aa, Artificial Sequence
  Synthetic
RDIMRKLLEEVKRSIDESKKRVKELVDEVRDSVRRSEEEVERLLRSNHRLSDEVRK

SEQ ID NO: 15315 - protein, 58 aa, Artificial Sequence
  Synthetic
DDVERVIEEVKRVVDDSKRRAEEVVEESRKIVTDSERKVREMVRDVRRIVKEVEERIG

SEQ ID NO: 15316 - protein, 56 aa, Artificial Sequence
  Synthetic
RRIVKKLLEDVRKSVKESKDTVDKLVEENKRSVDRSLRELEKLLKEVEDLIREVTR

SEQ ID NO: 15317 - protein, 58 aa, Artificial Sequence
  Synthetic
DEVDEVVKRSRDVVTESEKRLRDVVRRSKEIAEDSRRRVREVVERLKEIVREVEERIG

SEQ ID NO: 15318 - protein, 56 aa, Artificial Sequence
  Synthetic
RRVVEELLRRDEKSVEDSLRRVEKLVEDNRKTSEDIEREVRRLEEEVRKLVEDVTK

SEQ ID NO: 15319 - protein, 58 aa, Artificial Sequence
  Synthetic
REVDEVVERMKELVATVKRENDEVVKELKKLVKELEDDNRRVVEESKKSVEDLARRVG

SEQ ID NO: 15320 - protein, 56 aa, Artificial Sequence
  Synthetic
RDLVREVEKRVRDIVEESRKLAEETRKKVEDIIEKSKRIAEDTLEKNKEMVERLER

SEQ ID NO: 15321 - protein, 59 aa, Artificial Sequence
  Synthetic
REDELVERLVDKVRRSSKEVRDRAEEMVRRNEKLVRDVEEDLDRLVEENKKLVDSVSRL

SEQ ID NO: 15322 - protein, 55 aa, Artificial Sequence
  Synthetic
KEVVDRLRELVERSEKDVRKVVEEDKRITDKLEKRVREVVKRNEEITDELRERVR

SEQ ID NO: 15323 - protein, 60 aa, Artificial Sequence
  Synthetic
SSIERVAKLVEEVERHVRKSIKDVEKLVRDVERHIEESVKTVSKLVEDVKRAVEELRRKV

SEQ ID NO: 15324 - protein, 62 aa, Artificial Sequence
  Synthetic
EDVERLVREVVKRLEEIVERSERLVREVEERLKEIVERSRRLSKENEDELRKIEKEVRDRVK

SEQ ID NO: 15325 - protein, 55 aa, Artificial Sequence
  Synthetic
KDVEDAERRLKELLDRLKRFVEESVKTSKKIVDDSKRVVEESAKRSRDIVREVKD

SEQ ID NO: 15326 - protein, 56 aa, Artificial Sequence
  Synthetic
REKIEELVKEVDKLIKDVVRRMEKLNREVKKSADDSAREVEELNRRVREVVERVRT

SEQ ID NO: 15327 - protein, 57 aa, Artificial Sequence
  Synthetic
DEVEEVEKELRELVKRSEEVAREVKDRLRKLVEESERVVRESRRKSREIVEEIRKKV

SEQ ID NO: 15328 - protein, 56 aa, Artificial Sequence
  Synthetic
KDEARRLVEEVKRSVEKSVKELEDLVEEVKRSVEESVKEAKELNDRVDETVKRRAT

SEQ ID NO: 15329 - protein, 57 aa, Artificial Sequence
  Synthetic
RSVDEVEKELRELVERITRFVEKSVRDSRKIVEDSKREVEKVKDDLRKIVEEIRRKV

SEQ ID NO: 15330 - protein, 56 aa, Artificial Sequence
  Synthetic
EEDAKRLVKEVAELIKRVVEEMKKLNDEVEESARRSVEEARRLVEEVKRLVDEVAT

SEQ ID NO: 15331 - protein, 59 aa, Artificial Sequence
  Synthetic
EVEELVERVLRELERLVRENKESSDRIKEELRKLVEDNEKSVRDTKRTAEKLVDDLRRK

SEQ ID NO: 15332 - protein, 59 aa, Artificial Sequence
  Synthetic
ERVVRKVREDVKRVERLSKEIVDDSKREVEKVVETSRRIAEKSTDVVRRVKRELEEITR

SEQ ID NO: 15333 - protein, 59 aa, Artificial Sequence
  Synthetic
SMKELIKRVKDLVDEVRKKVERLIEEVSKLVDDVKRHIRELIETVKRLVKEVADLLRAG

SEQ ID NO: 15334 - protein, 59 aa, Artificial Sequence
  Synthetic
EEARRLVEKVERDLKDIVRRVEELSRRNVERLKEIVKESRELVKEVVERLKRIAEEVTT

SEQ ID NO: 15335 - protein, 56 aa, Artificial Sequence
  Synthetic
KEKEDVKRRLEELIRRLEEHSKKVKRDLERVIKELDDEVRRVKERHEDVIRRLKDR

SEQ ID NO: 15336 - protein, 55 aa, Artificial Sequence
  Synthetic
DDVVRRVKELLRRVLEHTRKVVEDVRRLLKRIREKLEEISRKLDELLRRIEEKRR

SEQ ID NO: 15337 - protein, 58 aa, Artificial Sequence
  Synthetic
DREDEVRKDIERIERELRRVVDELRKEVEDSMRKLDEEVKRLEEHIRESVERLEERVS

SEQ ID NO: 15338 - protein, 55 aa, Artificial Sequence
  Synthetic
EKVLRDLKRVVDEVRKELKDVLDRHNKVVREVERKLEEVIDKHRKAVEKVKRDAK

SEQ ID NO: 15339 - protein, 59 aa, Artificial Sequence
  Synthetic
SREEELKKEVERLVREAEKHVEDNRKHVEDSVRELEKLVKELADKARESADRLDKKVKE

SEQ ID NO: 15340 - protein, 55 aa, Artificial Sequence
  Synthetic
ERVLEELKRVVDDIRKKHKDILKRHRDVVRKVEKELRDILREHNEVIREVKDKLE

SEQ ID NO: 15341 - protein, 60 aa, Artificial Sequence
  Synthetic
SEVERILKEAKRRLDEVVERLRKSAETLRRMLERVSRELKKSHDELDRVLRRVEDALRKR

SEQ ID NO: 15342 - protein, 56 aa, Artificial Sequence
  Synthetic
AEELRKEVEDMVRDLERLVREHSDRVRKIVTDLDRLVKEHNEEVRKIVERLDEEVK

SEQ ID NO: 15343 - protein, 60 aa, Artificial Sequence
  Synthetic
SELDEILERLKEVLERVKRKLEESNRRLEEVLDRVLKKLTESVKRLEDELRRVLKELREN

SEQ ID NO: 15344 - protein, 56 aa, Artificial Sequence
  Synthetic
IEEIKKDVERIVRELEDLVRRHEKRVEDIVRELEKIVRDHNERLKEIVRRAEEDVR

SEQ ID NO: 15345 - protein, 60 aa, Artificial Sequence
  Synthetic
RELEEILKRLEEVLERVLRELRKSVERLRKELERVLKELRDSNRKLDKVLREVLEELRKK

SEQ ID NO: 15346 - protein, 56 aa, Artificial Sequence
  Synthetic
AEDLERRVKEIERRLKRLVDEHNRRLREIVRELEEIVKRHKERVEEIVRELKRRVD

SEQ ID NO: 15347 - protein, 60 aa, Artificial Sequence
  Synthetic
SELDDIVRRLDEMLKRVEDELRKSDERLDELLKRVKKELEKSNRDLERALREVLKELEDR

SEQ ID NO: 15348 - protein, 56 aa, Artificial Sequence
  Synthetic
ARELEEEVERIVRELEKLVEEHKEELERLARKLEEIVRRHEERVRRIVKELEDRVK

SEQ ID NO: 15349 - protein, 60 aa, Artificial Sequence
  Synthetic
RELDEILRRLREELKRVREELEKSLKRLEDELRKVEEDLRESNERLERMLERVLRELRKR

SEQ ID NO: 15350 - protein, 56 aa, Artificial Sequence
  Synthetic
VDELRKELEKIAREAREYVKRNKDDLRRIVEELRKIVKKHKDKVEEDVRRLKKDVD

SEQ ID NO: 15351 - protein, 56 aa, Artificial Sequence
  Synthetic
RELEEILKKLEEVVRTVEELHKRTNEKLEKAVDEVRELHRKTNEDLKRAVDEVEKA

SEQ ID NO: 15352 - protein, 56 aa, Artificial Sequence
  Synthetic
KDRLDEEVKRLVEEARRSVEDDDRNIRRLVEEAKDSVRRDEETIKKLVDELREATR

SEQ ID NO: 15353 - protein, 56 aa, Artificial Sequence
  Synthetic
SDLERILKRLREVIKRAEELHRKTNEEDERVVREVIELHRKTNEDLREVIERVARG

SEQ ID NO: 15354 - protein, 56 aa, Artificial Sequence
  Synthetic
KEELRKAVEELEEKLERSVREDKKTSDDSARRAKKSVEDDRRTIEKLVEEAERSRK

SEQ ID NO: 15355 - protein, 61 aa, Artificial Sequence
  Synthetic
KDLEKLLDDIRKVLEEVTRRLKRISDELRRVLEEIKKRLDKDNEDLKRVIDEVKKLLDKKV

SEQ ID NO: 15356 - protein, 56 aa, Artificial Sequence
  Synthetic
REEIEKEIRDVEEELRRAVEENAELVKRVKEDAERVVRDSEKKSKEVAEELKDAVR

SEQ ID NO: 15357 - protein, 57 aa, Artificial Sequence
  Synthetic
SELEKILKELKDASREVEKRLRDILREDKKMLKKVVEELEEILRRLDEEVKKVKERL

SEQ ID NO: 15358 - protein, 60 aa, Artificial Sequence
  Synthetic
REEVVDRAKKEVDDHVKKAEDVVREVEKRSRESVKRLRDIVEELERLVKRLVDEAEREVK

SEQ ID NO: 15359 - protein, 60 aa, Artificial Sequence
  Synthetic
SETEKLLEEVRRIIEEIKKRIDRSLEEVRRSVEEAKRRIEKSLEDVEKSVRRVKKILDEG

SEQ ID NO: 15360 - protein, 56 aa, Artificial Sequence
  Synthetic
DRVLKEVEDLAREVKKRIDEVDKRVAELHKEVEDRLREVDKTVEELHRRVKKRADD

SEQ ID NO: 15361 - protein, 60 aa, Artificial Sequence
  Synthetic
SIEDVEREVKRLIERTKRHNDRVLETIRRLLEETKKHNEKVLREIRELIKRVEDTMRRRG

SEQ ID NO: 15362 - protein, 59 aa, Artificial Sequence
  Synthetic
EETIKRLLDEVREYVRKSEEDSERLLRDVERYVKESKERSERILKEARRLVKEVEDKIR

SEQ ID NO: 15363 - protein, 59 aa, Artificial Sequence
  Synthetic
SIEEVLEEVRDLLRKTKEDTKRILDEIRRLLEETKKRLEEVLREATKLLREVEDLVRKS

SEQ ID NO: 15364 - protein, 59 aa, Artificial Sequence
  Synthetic
EEEVKRLLEKARKLVEESKRESKEILDRARKYVKESLEEIERLLDELRKLIEELRRRIE

SEQ ID NO: 15365 - protein, 59 aa, Artificial Sequence
  Synthetic
SSEEILKEVKELIEESNRASEEVLKEVKKLLDESKKRSDEVLEEVERELKRLEESASRI

SEQ ID NO: 15366 - protein, 53 aa, Artificial Sequence
  Synthetic
VVREMRRLVEEDKRRIKEALDRLRKLVEDDKRRIEEVLREMRELIRELEERIR

SEQ ID NO: 15367 - protein, 61 aa, Artificial Sequence
  Synthetic
KEIEDILERLKETIKEIEDHIRRDLEELKKVIEELKRSLEEWKKRAERLIEELERLIRETG

SEQ ID NO: 15368 - protein, 56 aa, Artificial Sequence
  Synthetic
ERVLREAEERIRRLEEKLKEVNKRSEEMLRRLKEEHERVLREVKELIREIDDKARK

SEQ ID NO: 15369 - protein, 59 aa, Artificial Sequence
  Synthetic
GEDEVLRKVEKLLREVKERAEKSVERVERLLKDVEDKLKESHDRAKRLLEEVKKAADRG

SEQ ID NO: 15370 - protein, 56 aa, Artificial Sequence
  Synthetic
LKDLDRRIEEVVKRLEDEVRRHTKEVEEMVKRLRELVREHTERVKKIVEDLKREVD

SEQ ID NO: 15371 - protein, 59 aa, Artificial Sequence
  Synthetic
SEVEDVERRIREIIERLRRIVERHKEEVKKIIEKLEKLVRDHTERAKRIIERLKEVVDR

SEQ ID NO: 15372 - protein, 56 aa, Artificial Sequence
  Synthetic
EEVLKEVERLLEEVKELVERSHKEAEDLLKRVLDAMKRSVDEVEKLLEELKRRADK

SEQ ID NO: 15373 - protein, 59 aa, Artificial Sequence
  Synthetic
SKVEKVEEDIDKIIRRLEELVEEHRTEAEKTVKKLDDDVRRHNEKVEKIIRDLEEVVRR

SEQ ID NO: 15374 - protein, 56 aa, Artificial Sequence
  Synthetic
RKVLEDAKRLLERVMDEVRRSNEELKKLLEEVKRKLKKSVEDAERLLDEVRKRVEK

SEQ ID NO: 15375 - protein, 59 aa, Artificial Sequence
  Synthetic
SEVEEVDKRIREIVTTLKRLVEEHNDRARKIIEKLRRLVKKHEDEVEEIVRRLDEAVER

SEQ ID NO: 15376 - protein, 56 aa, Artificial Sequence
  Synthetic
EEVLKKVKELLKEVKRRLERSLEELERLLEEVLKLMKESNDKAKELLERVREKVER

SEQ ID NO: 15377 - protein, 57 aa, Artificial Sequence
  Synthetic
DFVERVKEEIKRIVERLKRLVKEHEDEVKRILDELRKLVETHKELSKDSLRKLEEVG

SEQ ID NO: 15378 - protein, 56 aa, Artificial Sequence
  Synthetic
ERVLEELRRLVKEVKERADRSSEKLNELLRKAEEDAKRSSEENNRRLEEVERRVRK

SEQ ID NO: 15379 - protein, 60 aa, Artificial Sequence
  Synthetic
DEERKIEEIIDKSRRDWERLLREAREIIKRSEDEWRELLERIKRLIEETRKRAKDLKKAD

SEQ ID NO: 15380 - protein, 59 aa, Artificial Sequence
  Synthetic
EEIRRLLEEMDKLSREASKRVEDILRELEERSRRMADEVRKLNEENKKLLEEAKKELKD

SEQ ID NO: 15381 - protein, 58 aa, Artificial Sequence
  Synthetic
DKEEIKEKLEELVERVVRELEKLLKELEDLSREVARRIKKIARDLEKLTKEVEEKLRR

SEQ ID NO: 15382 - protein, 56 aa, Artificial Sequence
  Synthetic
EEELERLIKELVDRARKLLEEVKKLIEDHREKLKRVLDEIKDLLRKHKETLDRTDT

SEQ ID NO: 15383 - protein, 58 aa, Artificial Sequence
  Synthetic
SKEDILRELRDRVERIKREIEKIFRDAKRLSEEVKRRIEDLLRKLKKVSDDVRERLAR

SEQ ID NO: 15384 - protein, 56 aa, Artificial Sequence
  Synthetic
EEELKELIKRLVEDAKRILEELKKLLDDHERKARRILERIEKLIKEHEDKARERER

SEQ ID NO: 15385 - protein, 60 aa, Artificial Sequence
  Synthetic
SEVEKLEEEVERSVRDLERELRDSEEKSKELMRRLDELVRRAKDHVRRSVEELRKTLSKG

SEQ ID NO: 15386 - protein, 58 aa, Artificial Sequence
  Synthetic
EEVRRILRDAERVIEEIKRRLEEDHKRLEEVIRRVEEKLRRILDEHDKVVKEIKEALR

SEQ ID NO: 15387 - protein, 60 aa, Artificial Sequence
  Synthetic
SEVEEAEKEVEDIMRRLKRKVEENKRHVDESVKEAEKLLRDSETRTRDIARRLKEELDKG

SEQ ID NO: 15388 - protein, 58 aa, Artificial Sequence
  Synthetic
KELTRILTRLREVIERVKRALEKSHDDHRRAVEEVRKELKRDHDDLRRVIEKVRRDLK

SEQ ID NO: 15389 - protein, 60 aa, Artificial Sequence
  Synthetic
SEVEEAKRRVDDIVRKLEELLKDSRRESERIMRELKRLLEELKRHVEDSVRKLREVLSRG

SEQ ID NO: 15390 - protein, 58 aa, Artificial Sequence
  Synthetic
RELREILRRAKEVIDKIREDLERDHDRLREVIEEIKKTLDRIHEEHRRVVKEVEDTLK

SEQ ID NO: 15391 - protein, 60 aa, Artificial Sequence
  Synthetic
SEVEEAEKEVREIMKELDKLLEDSKRESDDIRRDLDRVLEENKRHVDKSVTDLERVLSRG

SEQ ID NO: 15392 - protein, 58 aa, Artificial Sequence
  Synthetic
KELRRILRELEEVIKRVERTLREDHKELKRVIDRMKEDLERSHEEHERLVEEVERKLR

SEQ ID NO: 15393 - protein, 60 aa, Artificial Sequence
  Synthetic
SEVEEAKKDVERIMRELEKLVRDNKKHVDDSVRKLKKLLDDLRKHVEDSREELERVLRRG

SEQ ID NO: 15394 - protein, 58 aa, Artificial Sequence
  Synthetic
RDLRKILEDLERIIRRVEEELRRSHERHKEVVDRIKKVLDEIHRRHREVVKEVEKELR

SEQ ID NO: 15395 - protein, 60 aa, Artificial Sequence
  Synthetic
KEVEEAEDKVRRIVEDLKRKLEDLERHVEESVRRLEDLLRRSKKKSDDIMEKLTRTLSKG

SEQ ID NO: 15396 - protein, 58 aa, Artificial Sequence
  Synthetic
KELRRILKRMKDAIERVERELRRIHTRHKEAVDRVREELKRNHDELAKVIRKVREDLK

SEQ ID NO: 15397 - protein, 60 aa, Artificial Sequence
  Synthetic
DEVERADEDVERIVRELRRVLEENRRHVKESVERLERLVRKSKKDSKKIMEDLKRVLDRG

SEQ ID NO: 15398 - protein, 58 aa, Artificial Sequence
  Synthetic
TELRKILKKMKDAIREIKRTLDESHREHRRVVEEVKEELERNHKELKEVIDKVAKDLE

SEQ ID NO: 15399 - protein, 58 aa, Artificial Sequence
  Synthetic
DEVEDILRRVREAVERARESLERIHREHKKVVDEVRKALEKVLEDHARVVDEFRRKSG

SEQ ID NO: 15400 - protein, 56 aa, Artificial Sequence
  Synthetic
KDELKKEVEKLEEELKKELKRLKDHVKKSKEDLRRKLEDLKRHVERSVKRAEEEAR

SEQ ID NO: 15401 - protein, 58 aa, Artificial Sequence
  Synthetic
SEVEKVLRDLERAVKEVSERHRRNHEELRKVIKRVKEEHDRIHDEHRKVVEDLKRKIG

SEQ ID NO: 15402 - protein, 56 aa, Artificial Sequence
  Synthetic
REEIKKEVDRLKKELDENLKRLERDSERLKKELEDNLKRLEEHVRRSKEEAERDAK

SEQ ID NO: 15403 - protein, 58 aa, Artificial Sequence
  Synthetic
SDLEEVLKRLEDVVRRLEEELRRIHKEHRDVVRRVTEEHKRILEELKRVVERAREKDG

SEQ ID NO: 15404 - protein, 56 aa, Artificial Sequence
  Synthetic
RDRVTKEVRDLEEELRELLERLRAHVKRSEKKIEENLRRLEKRVEDLKKKIDDRTR

SEQ ID NO: 15405 - protein, 58 aa, Artificial Sequence
  Synthetic
RELEDIKRKHKKVVDDVREKLKESHRRLKEVIEEARRRLDEVRKKLEKVIREILTSAG

SEQ ID NO: 15406 - protein, 56 aa, Artificial Sequence
  Synthetic
IEDLKRYVEEVKRDLDDLIRRSEELVRRIKEDLDRALKELEELVRRIKKKLEEDRK

SEQ ID NO: 15407 - protein, 60 aa, Artificial Sequence
  Synthetic
SELDELRERVERHSRELRRTLEEAKKLVDDHKRTLREVLERIKKRVEDVKRELEKLVRDG

SEQ ID NO: 15408 - protein, 59 aa, Artificial Sequence
  Synthetic
REELKKIIDELRRVNEEAAKTLDEIIKRLEDVNREVNRTSKEVIDRLRKVLEEAERRTK

SEQ ID NO: 15409 - protein, 60 aa, Artificial Sequence
  Synthetic
EELDRIRKEVEDHERKLREVVKDIERKVEEHAKRLKKVIEDDERRVKEWKDTLEELIRRG

SEQ ID NO: 15410 - protein, 59 aa, Artificial Sequence
  Synthetic
KDEVRRVIKELRDVNRKVADALRKVEEKLKRVNDEMNKESKRTLDELDKALEEAERRAR

SEQ ID NO: 15411 - protein, 60 aa, Artificial Sequence
  Synthetic
DLLRELEARVRKHKRDLEEVLKKIEEEVRRHKKKLEDVLEELRRLVEDLMRELKELLEKG

SEQ ID NO: 15412 - protein, 59 aa, Artificial Sequence
  Synthetic
REELKRIIDELREVNERVNDESRKVIKELRDANKEADKKVRDIIRRLEDILRKAAEDTR

SEQ ID NO: 15413 - protein, 60 aa, Artificial Sequence
  Synthetic
KDLERLEKEVKEHKEDLERIVREAEKLVEDHERELEKVLRELEKTVRDVKRELEDLLRRG

SEQ ID NO: 15414 - protein, 59 aa, Artificial Sequence
  Synthetic
KEEVDRVLDELRKVNKKAADDLERVIRELEDVNRRVNERSREIIETLKRVLDEVREKTR

SEQ ID NO: 15415 - protein, 60 aa, Artificial Sequence
  Synthetic
DELRELKRKVDEHTRELERILKEIEDRVRRHKEKLDETVKRDKDRVDEWLRRAEELVRRG

SEQ ID NO: 15416 - protein, 59 aa, Artificial Sequence
  Synthetic
REEVEKIERRLREANKRAADALKKVIDELRRANEEVNRKSEETLKTLDKILEDVERKTR

SEQ ID NO: 15417 - protein, 60 aa, Artificial Sequence
  Synthetic
DDLERLAEEVKRHSEDLDRIVEEIRDRVRRYKEKLDEVVKEDEKRVREWRDRLEKLVRAG

SEQ ID NO: 15418 - protein, 59 aa, Artificial Sequence
  Synthetic
KDELDKIITRLEEANRKAAEDLRRVVEELRKAHEEMNRKSEKTKKDLDEVLEEAERRTR

SEQ ID NO: 15419 - protein, 60 aa, Artificial Sequence
  Synthetic
DDLERLKRRVEEYRRKLEEVLKTIEEEVRRYKKEAEKVLDEDRRRVEDWKRKLDEMVRRG

SEQ ID NO: 15420 - protein, 59 aa, Artificial Sequence
  Synthetic
EEDVRRIIDELRRVHKRANEDSKRVVDELRDVHRKVNETSEETKKRLDKVLKEAEDRTR

SEQ ID NO: 15421 - protein, 60 aa, Artificial Sequence
  Synthetic
KKLDDIRREVERLTDKLEKIVKRIKELVDRYRRKLERVLEEDDRRVKEWKRRMEELLRRG

SEQ ID NO: 15422 - protein, 59 aa, Artificial Sequence
  Synthetic
KEEVDKVLKDLDRALKKAADDLKRVIDELREVHERINRTSERTLTKLDRALEELEKRLR

SEQ ID NO: 15423 - protein, 60 aa, Artificial Sequence
  Synthetic
KELDEIRELVKRHKDKLKKIVDEVKERVDALKRKLKEILDEDRERVKKWVRDMEELVRRG

SEQ ID NO: 15424 - protein, 59 aa, Artificial Sequence
  Synthetic
KEDVDRVIRDLERVNEEANRRAKKVIDELRRVLEEAERTLRKTLEDLDRALEELARATK

SEQ ID NO: 15425 - protein, 58 aa, Artificial Sequence
  Synthetic
DEAEKILEELRKVVRELEEELRRNHEELKRVIEDVERKLRESNRRVEKVIKEVTDEKG

SEQ ID NO: 15426 - protein, 59 aa, Artificial Sequence
  Synthetic
EDVVRELEKLVEELKRRVTEVVETVARDSERLREELRRIVEESKRLVEELKRRAEEASR

SEQ ID NO: 15427 - protein, 61 aa, Artificial Sequence
  Synthetic
SELERVVEDLRRAAKKLADDLKRVIEEHRKYARDNKERLKKVLERLKRLAEELKKELERDG

SEQ ID NO: 15428 - protein, 55 aa, Artificial Sequence
  Synthetic
REVLEDVRRLIEDLERLITELRKENERVIRESEKLSRDIEREVERVIRELEETIR

SEQ ID NO: 15429 - protein, 56 aa, Artificial Sequence
  Synthetic
KEVEDVKREIDKVLEDARRLLKESDDTLKKILDKARRDLEESDRRLKEILDKVRKD

SEQ ID NO: 15430 - protein, 56 aa, Artificial Sequence
  Synthetic
FEELKDTVDKLRREIERRITESRRHVEELRRRVEEMLERSERNVREAEKKLEEDKK

SEQ ID NO: 15431 - protein, 57 aa, Artificial Sequence
  Synthetic
DEVERVEEELKKSDDELRRRMEEVKRALDKDNEDAKRMLDEVKKELEKILRKVEKEV

SEQ ID NO: 15432 - protein, 60 aa, Artificial Sequence
  Synthetic
KKEVVERLDKLVKEHHERNKRIVEEAKRLVEDSREKTRRIAERAKELVRRLKELVDRLSK

SEQ ID NO: 15433 - protein, 58 aa, Artificial Sequence
  Synthetic
DRIEDVKRKVKEIKEKVDRLLEESSKKVDDLNKKVRDLLTESNKRIEDIVRELRELAK

SEQ ID NO: 15434 - protein, 58 aa, Artificial Sequence
  Synthetic
EEAKEVLERLKRILEESRRASEENKKKLEKSHEELKRASDENKRKLERILDELREALR

SEQ ID NO: 15435 - protein, 56 aa, Artificial Sequence
  Synthetic
SAKEKIDKTLKDIYRKHEEVVRRVEKKHRDIHREHEEVVRRVEEEHRRILDELRKA

SEQ ID NO: 15436 - protein, 56 aa, Artificial Sequence
  Synthetic
EEEAKKFLDKLDKEVRDSMKRLEDHVRETKKRVEESVRRLEEHVKRTEEEVRETAT

SEQ ID NO: 15437 - protein, 56 aa, Artificial Sequence
  Synthetic
SVEDEVRRDLKRIYEKHEEAVRRVEERHERSNERLEDVIRKVEDKHREILKKLEDE

SEQ ID NO: 15438 - protein, 56 aa, Artificial Sequence
  Synthetic
EEDVKRVLDKLDEEVKDSVRELEEHVEKNERDVEEIAKDLERHVEETRKEVDKTAK

SEQ ID NO: 15439 - protein, 56 aa, Artificial Sequence
  Synthetic
KVEEKVRETLRRIYERHRKIVKEVEEKHRESNERLRREIERVKRKLDEILKKLEEA

SEQ ID NO: 15440 - protein, 56 aa, Artificial Sequence
  Synthetic
EDRVAEVLKKLKDDVDKSAEELERHVKRNRDEVRKIVEDLDRVLEELRTKVDEEAR

SEQ ID NO: 15441 - protein, 56 aa, Artificial Sequence
  Synthetic
SVEDKVRESLERIYKKHEKVLRDVERTLKEIHEEHREAVERVRRELERIKRKLEEL

SEQ ID NO: 15442 - protein, 56 aa, Artificial Sequence
  Synthetic
DKDVERVLKKLDDDVRKSVKELTDVLKRLREEVKRSVEELEDVLRKLDKEVDDTAK

SEQ ID NO: 15443 - protein, 56 aa, Artificial Sequence
  Synthetic
DVEDRIRKSLEEIYRRHETEVRKIKRKHDESHRRHEKVVREVTEDLERIKRRLEEL

SEQ ID NO: 15444 - protein, 56 aa, Artificial Sequence
  Synthetic
EEDAKRVLDELEEKVRRSVKKLREHVEENEKRVEDSVEELKRILEELRKAVDETTR

SEQ ID NO: 15445 - protein, 59 aa, Artificial Sequence
  Synthetic
SKKDEVEKLLKESERHSKKLVEDAKRLSDESKKHVEELVRRAEEELEKSDRDVKKVKDD

SEQ ID NO: 15446 - protein, 59 aa, Artificial Sequence
  Synthetic
EEVMDRVRRRLERDIRELRKALKRVEDTNEEITRELEKAMKEVKDTSDRILEKLRRARK

SEQ ID NO: 15447 - protein, 60 aa, Artificial Sequence
  Synthetic
SVKDKLKELLKDSKRNSDRLVERAKELLDRSRKHSKELEDRARKLLEDSRRKVEELERAN

SEQ ID NO: 15448 - protein, 59 aa, Artificial Sequence
  Synthetic
REVLEKARRDLERDLRENKKALDEVRRTLEEDSRRLREVLEEVKRISTKIIERLREIRR

SEQ ID NO: 15449 - protein, 56 aa, Artificial Sequence
  Synthetic
SEKEDAEKKLRDILTDLARIVREVEEALKKILDDIRKVSEESKRASDESLKRARDA

SEQ ID NO: 15450 - protein, 56 aa, Artificial Sequence
  Synthetic
GEELEELLRRLEEAVRRIAERLRKLLKELEEKARRLAEESKKLLEKDKEDVKRAAE

SEQ ID NO: 15451 - protein, 56 aa, Artificial Sequence
  Synthetic
SEKERIKEESKKSLDDLRRASERSKEELDRILKRIDEASKRSKEESDRSLKEVKDR

SEQ ID NO: 15452 - protein, 56 aa, Artificial Sequence
  Synthetic
GEELKDVLRELRETNRKLVEDSRKLLEELDRDVERLADESRKLLEDDKRKVREVAR

SEQ ID NO: 15453 - protein, 56 aa, Artificial Sequence
  Synthetic
SDEERIDELSKKSLEDLKRVSDDSKRKLDDILKKIEDASRESEDKLRRILEKARRD

SEQ ID NO: 15454 - protein, 56 aa, Artificial Sequence
  Synthetic
GRELERILEELRTDNDRLAKESDKLVKELEEEVRELIKRSETLLEELRKDVEELAK

SEQ ID NO: 15455 - protein, 57 aa, Artificial Sequence
  Synthetic
DAKERVDDALKKILDDHRRVLKKVEDDHRDSHREHRRVVEEVKRELEKVLKKLRDAG

SEQ ID NO: 15456 - protein, 56 aa, Artificial Sequence
  Synthetic
KEDLDRMLEKLREIVERSRDKLRRHLEKNKREVDDSKRRLEKMLRDLEKKVRDAER

SEQ ID NO: 15457 - protein, 57 aa, Artificial Sequence
  Synthetic
DDEERVKRKLEEVLRKHKEVVDEVIERHRRSHKRHRDMLREVDKKHRRILTELEKAG

SEQ ID NO: 15458 - protein, 56 aa, Artificial Sequence
  Synthetic
VEDLKRVLEDLDREVRESKERARKHVEDNERKVEESKKRADDNLRRLERKIREAAR

SEQ ID NO: 15459 - protein, 57 aa, Artificial Sequence
  Synthetic
SVEETVDEELKKIHETHKRVVDKVRREHEKSHKKHRDILKRVEEVHRRILTDLERAG

SEQ ID NO: 15460 - protein, 56 aa, Artificial Sequence
  Synthetic
KKDLDEMLRRLKRKVDESERDLKKHLDDNKRAVEKSREDAERNLKELRDKIREVKR

SEQ ID NO: 15461 - protein, 63 aa, Artificial Sequence
  Synthetic
REEEEARKVLEELKRDVERNERESKEILDKDKRDVEEWVKELEKMLEESKKLVDDVRKAKKDL

SEQ ID NO: 15462 - protein, 55 aa, Artificial Sequence
  Synthetic
EELKKAVEDIIRTLREVLEKSRKTLKDSNDRLRRALEKAREDSKRSIRRLREELR

SEQ ID NO: 15463 - protein, 59 aa, Artificial Sequence
  Synthetic
SVREDAKRLLEELERAVRELVERLKKLIERHRRASEDTRRELEKLLRELEKAVEELKRG

SEQ ID NO: 15464 - protein, 58 aa, Artificial Sequence
  Synthetic
KALEDVKEALDRILERVKRAIEEARKKLDDVDEHNREVIERVEKEIDRILKDVEDAAR

SEQ ID NO: 15465 - protein, 59 aa, Artificial Sequence
  Synthetic
SVEEEARELIERLRKLSEDTMRRLTELLKEHERLSRETKKEAERLLDELRKKVDDLTRD

SEQ ID NO: 15466 - protein, 58 aa, Artificial Sequence
  Synthetic
EVLERVKRELDRILDHNKKVVDEAERALRRVDKHNEDVLREVEKTLERILDKVKESAR

SEQ ID NO: 15467 - protein, 57 aa, Artificial Sequence
  Synthetic
SVEEKLEKIVRDLERRVRKSEEDLRRMVEEVERTVEKHREELKRVVDTLRKIVRDKG

SEQ ID NO: 15468 - protein, 59 aa, Artificial Sequence
  Synthetic
EKVARDIKDKVREIIRRNEEVLEEVDRRARELIERLERTIEKSERDVERIIRELRERAK

SEQ ID NO: 15469 - protein, 59 aa, Artificial Sequence
  Synthetic
SKEEEAEKLVRDLEDSSRKHKDRLRKLVRDLEELVKEHERDLKRIVEELKKLVDDASRS

SEQ ID NO: 15470 - protein, 55 aa, Artificial Sequence
  Synthetic
KELEEELRRNLKEVREVTEDAKRKLRDILRKVEDASRRVKEMLDKILKRVEEEIR

SEQ ID NO: 15471 - protein, 57 aa, Artificial Sequence
  Synthetic
KLDEDIRKLLKEALDRNKEMLERLKKTLDEALEKVKKLLEDLRRVNKEVEDELRRAG

SEQ ID NO: 15472 - protein, 59 aa, Artificial Sequence
  Synthetic
EDVLREVIRRIRKVIEDTDRTWKRLIDEIRKEVKDVLDKARRLIRESEKLMEDIKRRTK

SEQ ID NO: 15473 - protein, 56 aa, Artificial Sequence
  Synthetic
DMEKRIEKLLKDMLDRVRELHKRVREVNKEVNKRVKELHDEVRKVNEKVNKAVKDR

SEQ ID NO: 15474 - protein, 59 aa, Artificial Sequence
  Synthetic
EEVLARVIERIRKDVEKVLREAEKHIEESRRLARKVLEELRRHIEENRRLLEEVDRRRR

SEQ ID NO: 15475 - protein, 57 aa, Artificial Sequence
  Synthetic
EVEKKVEELLKRIEDDNKRVADRSRKLLRELKKRLEDVVRESRELLRRILKKLKEAG

SEQ ID NO: 15476 - protein, 56 aa, Artificial Sequence
  Synthetic
EDEVADRLRKLRKESEEVVERSDRHLKDLERRIEEMAERSRRHLKRLEDKIREDAR

SEQ ID NO: 15477 - protein, 59 aa, Artificial Sequence
  Synthetic
SMEDRVREMLRTIKRVIEEAHERSKKILDEDRKVLKAVEDAVRDVLTKIKKLLDDARRR

SEQ ID NO: 15478 - protein, 55 aa, Artificial Sequence
  Synthetic
EEVVKRAKKLLEEIEKLARESLERLRDNLRKTEKLLKDLLDEAKRLLEEIKETVD

SEQ ID NO: 15479 - protein, 60 aa, Artificial Sequence
  Synthetic
DIEEEVKKILDEIRERIKKMKRDLERLSKEDEDVLRKVKKDVDEVLKRAEESLRDVKRRG

SEQ ID NO: 15480 - protein, 55 aa, Artificial Sequence
  Synthetic
EEVLRKLEEILRDIKRKADELRKRYRENIEETERLLEELLRRAEELLRRLDETAR

SEQ ID NO: 15481 - protein, 61 aa, Artificial Sequence
  Synthetic
SEAEKLLEDIRRIIKEVKENVERSLEKIKRLIEELEKNARDLVRRIRKLIEDLERKVRRDG

SEQ ID NO: 15482 - protein, 59 aa, Artificial Sequence
  Synthetic
EKVIRDIEKLIEDLKRISEKANEDNKRLIDDMRRISKEVARTIKELIERLRKIVEEARK

SEQ ID NO: 15483 - protein, 61 aa, Artificial Sequence
  Synthetic
SEAEELLERIKKLIEDLKRDAERLLREIEEMIKDIRRHVEEDLRRLREVIKEIKRLVDERG

SEQ ID NO: 15484 - protein, 59 aa, Artificial Sequence
  Synthetic
EEVEREIRRLIEEMKRISEEVRKEIKRLIDELEEIVRRAKEALKKLNEELKRIVDEAKR

SEQ ID NO: 15485 - protein, 59 aa, Artificial Sequence
  Synthetic
SKVEEVLKRLERLIRELKRLMDEVREDNREVLERLERYAERNERENRELLKKLEDVARR

SEQ ID NO: 15486 - protein, 56 aa, Artificial Sequence
  Synthetic
KEELDKMLKTAERVLREIEKDIEKLDRDLKRVVERIRDRSRRLDEAAEEIVRRIED

SEQ ID NO: 15487 - protein, 59 aa, Artificial Sequence
  Synthetic
SKMEEVLKRLEKLLRELEEYVERNERENRKLLEELEDYVRRNEKRNKEILEELRDVVRR

SEQ ID NO: 15488 - protein, 56 aa, Artificial Sequence
  Synthetic
DEELRKALERLRRVVEKVEDISRELDDRLRRVVEKAEEISRRLDEEIKEVVDRAEK

SEQ ID NO: 15489 - protein, 59 aa, Artificial Sequence
  Synthetic
SKVEKVLDDMRRIIEEAERLLEEVKRRHDEIIERVKRYAEENRRRNEELIEDLKRVAEK

SEQ ID NO: 15490 - protein, 56 aa, Artificial Sequence
  Synthetic
KDDVRRLLEELRKVVEDVKRLSKKMNDRIEKIAKEIEEESERLDRTIAEIVKEIEK

SEQ ID NO: 15491 - protein, 59 aa, Artificial Sequence
  Synthetic
DEVEKVLEELRRLLKEDEDIVRELLKRLKELLEDIDRIAKETEKEWRKILREIEELRRK

SEQ ID NO: 15492 - protein, 59 aa, Artificial Sequence
  Synthetic
EDAEREVDRVVRTIEESTKDAREKVKRMADEIERIIKEVEDLNRKLVEEIERVIREVER

SEQ ID NO: 15493 - protein, 56 aa, Artificial Sequence
  Synthetic
DSEETLRELVKTIEDSSRKVKKRNEELARELRRRIEEAREANDRLVETIRKEIREL

SEQ ID NO: 15494 - protein, 56 aa, Artificial Sequence
  Synthetic
REELEKTARKLIEDDEKKARDTEREWEELIRDIERLVRESLEAWKRLREEIRETVR

SEQ ID NO: 15495 - protein, 56 aa, Artificial Sequence
  Synthetic
KSEEELRKLVRELEELIERMERTNEKLLRELKEVLDRARERNEELVRRLEDLIRRL

SEQ ID NO: 15496 - protein, 56 aa, Artificial Sequence
  Synthetic
EEELRKEAEDLIREIEEKVRRSKRNLEELIREIRELVERSEDEWRKLIKRIADAVK

SEQ ID NO: 15497 - protein, 56 aa, Artificial Sequence
  Synthetic
SSEETLERLLREIERVLEEARKRNEDLVRKIREVIKEALERNKRMLEEIKKEIDRL

SEQ ID NO: 15498 - protein, 56 aa, Artificial Sequence
  Synthetic
SEELLRTAKRLLEDIERIVRETLKKWRDLEREIRKLVRESTENLKRIIEEIRERAR

SEQ ID NO: 15499 - protein, 55 aa, Artificial Sequence
  Synthetic
SKVDEVIRDLARLLDELRRHVDDSVRRMDEVVKRSTREADELAKRLDELVKEVEK

SEQ ID NO: 15500 - protein, 56 aa, Artificial Sequence
  Synthetic
KEKIDRIIRELERILEEAKKKHEDVLRRLEDSLRRVAELLKAALDRLREIVDRLRR

SEQ ID NO: 15501 - protein, 55 aa, Artificial Sequence
  Synthetic
SKADDVIRKLRELLEELRTHVEKSIRDLRKMLEDSTRHAKRSIEELERLLEEVRK

SEQ ID NO: 15502 - protein, 56 aa, Artificial Sequence
  Synthetic
EEKLKDLIRKLRDILRRAAEAHKKLIDDARESLERAKREHEKLIDRLKKILEELER

SEQ ID NO: 15503 - protein, 55 aa, Artificial Sequence
  Synthetic
SKVEEVVRTLDELLKRLEEHVKESIRRIKKVIDDSNREADELIRDIDRLLKELEK

SEQ ID NO: 15504 - protein, 56 aa, Artificial Sequence
  Synthetic
KDRVERIIRELRRILEEIRDLHRKLEEELRRSLKEVEDRLRELLKKLEDILRELRR

SEQ ID NO: 15505 - protein, 59 aa, Artificial Sequence
  Synthetic
DEVEDLLRKLKDTIRRLKAHADRDLKKLEEILEKLRRHVEKNLRDLERILKELKDLSRT

SEQ ID NO: 15506 - protein, 59 aa, Artificial Sequence
  Synthetic
EEVAERVRRVIKELRKLLEEIARALEDVNKKAKEINDKADEDSKRVNDELKRIIKEIRD

SEQ ID NO: 15507 - protein, 60 aa, Artificial Sequence
  Synthetic
SEVDELRRRAEESSKKIRKIAEELTKRLKDLLETIRRLMRKIEEDMKRTSEEIKDLIRRG

SEQ ID NO: 15508 - protein, 59 aa, Artificial Sequence
  Synthetic
DRLRDVVKKLHKKNKDILDEIRDIVRRLKEEVDTILKEIKERLEELHKNNERLLREAKR

SEQ ID NO: 15509 - protein, 60 aa, Artificial Sequence
  Synthetic
SAKEKLEDLLRKLKRILDELEKTSREMKERVERIIRELEKTVREVHERIKRLIDEALKRN

SEQ ID NO: 15510 - protein, 55 aa, Artificial Sequence
  Synthetic
EELKKELEDLLRKIEKLIKESEEKWRRLLEEIKREIERLRETYAEILRDVKRRDK

SEQ ID NO: 15511 - protein, 60 aa, Artificial Sequence
  Synthetic
SAEETVRKLLEEIKEIIKRMEDRVREVLEENRKSIEDLEERVRRLHEEVERIIREALEDL

SEQ ID NO: 15512 - protein, 55 aa, Artificial Sequence
  Synthetic
DEVKRELKRILEEIEKLIEELLRRMKESNKKIRKLAEDLTREYKRLLDEIRKRRK

SEQ ID NO: 15513 - protein, 55 aa, Artificial Sequence
  Synthetic
REVEEVVKRAEEVIRRLEKEVEDIVRRVAKHLKDNEDHARRSVERLRRDIEELKK

SEQ ID NO: 15514 - protein, 56 aa, Artificial Sequence
  Synthetic
DELVKEVKKKIDDVLKKAEDLARKLKKEHDEVVARITEAHDEVKKRVEKVLKELED

SEQ ID NO: 15515 - protein, 55 aa, Artificial Sequence
  Synthetic
SKVEDVIREIRELIKRLEKHVKDSVREVRKHIEDNKRKVEKLVKEVEDVIRELRK

SEQ ID NO: 15516 - protein, 56 aa, Artificial Sequence
  Synthetic
RELAEELRRRLDEVLEKATRLHRELEKRHDDVLREAEKRLRDLKREIDKVLDDLRR

SEQ ID NO: 15517 - protein, 56 aa, Artificial Sequence
  Synthetic
EEVERVVKELRDHLAETKKKIDEIIKRLDDHIEENRERVERMVEELRRILKEIRDS

SEQ ID NO: 15518 - protein, 56 aa, Artificial Sequence
  Synthetic
REVVDEVRKEHRDVLREAEELIKRVEKDHEKSHREVKKLIEDVERRLREVLKELRD

SEQ ID NO: 15519 - protein, 56 aa, Artificial Sequence
  Synthetic
KEAEDTIRKVSKHIEDNKRKVEEMIKKLKEHLKETEEKIRRIVKKVRDEVRKLEEN

SEQ ID NO: 15520 - protein, 56 aa, Artificial Sequence
  Synthetic
EKLVRDLKRRHKESHDEARKLIEEVRREHEEVLKRAEDLIRELDKRLKEVLDKLRK

SEQ ID NO: 15521 - protein, 57 aa, Artificial Sequence
  Synthetic
SEAEEVVRRVEKHIRDTEKKIRDIVRRVKEEVDRNSERVREMVERVRKEIEELERAQ

SEQ ID NO: 15522 - protein, 56 aa, Artificial Sequence
  Synthetic
KEVVDELKKRHREVLEEARRLIEELKERAERSHRESKKLIDELREEIRRVLEERRR

SEQ ID NO: 15523 - protein, 57 aa, Artificial Sequence
  Synthetic
SEVEDIVTKLRDKVERHREEVKRIIDTLKKLVEEHKRRVDDEVKKLDDTVKRLREAN

SEQ ID NO: 15524 - protein, 59 aa, Artificial Sequence
  Synthetic
KRVDDLLREVEERLERSNREARKLLEEVKREMEESHRRLKKLLDEVREKVRRVVEELRK

SEQ ID NO: 15525 - protein, 60 aa, Artificial Sequence
  Synthetic
KVEELVKEVDERIKKVLDDLRRALEDVRKKAEDSVRRMEELSEKVKRDLDRVIAKAEEKG

SEQ ID NO: 15526 - protein, 55 aa, Artificial Sequence
  Synthetic
EEVVKRLEEILRRLKETIDRVLERLKRRVEDHDRKVEKRVRENEKAVEDLKRRID

SEQ ID NO: 15527 - protein, 60 aa, Artificial Sequence
  Synthetic
SVEEVLEEARKDIDRLIRRMEEISERAKEKIERLIDELRKISEEANKKNEEVLRELREKG

SEQ ID NO: 15528 - protein, 56 aa, Artificial Sequence
  Synthetic
REDIKREVDRLLEEIRRLIERLRENVKKLLDEIRKLIEELDENVKRSLKKLRDDIR

SEQ ID NO: 15529 - protein, 60 aa, Artificial Sequence
  Synthetic
SLDDILREVRRTSRELNEESRRIVDRAKRESEELLKELETILRDATRRLDDLLRKLDEKR

SEQ ID NO: 15530 - protein, 60 aa, Artificial Sequence
  Synthetic
RETVVKELEDKVREHLRTNRELIERLEKEMRDHLREIKRKIEELERRIRKLVEEVKRRID

SEQ ID NO: 15531 - protein, 61 aa, Artificial Sequence
  Synthetic
DELEDLVRKAEKLVRESEKKIKEIVDDARRLIEDSEREIREIVKKLRELSKRVEEELRRDG

SEQ ID NO: 15532 - protein, 56 aa, Artificial Sequence
  Synthetic
KDLLKELRDKSKRVLEKLRRLLEEINKRSRDVLEKLKRLADEVRESNREVLDRARK

SEQ ID NO: 15533 - protein, 56 aa, Artificial Sequence
  Synthetic
RELEEIVKDAERLVKKDTEDIRDKVRRAEEVVKKDTEDLEESVKRVKDKVKELEDA

SEQ ID NO: 15534 - protein, 56 aa, Artificial Sequence
  Synthetic
EELLREIEERIKRSLDESRKLVREIEKKVDESNERSRKLVEDVEREIEEVLKRLAD

SEQ ID NO: 15535 - protein, 59 aa, Artificial Sequence
  Synthetic
SSEDILREVKKLLDDSLDKLRRLIEKIKEDLDRSVDRHRKLSEEIRRRHERVREAVERR

SEQ ID NO: 15536 - protein, 55 aa, Artificial Sequence
  Synthetic
EDVARKLRELVREHSKEVEDKVRRAARLVEEHTERSDRVADKLRKHIEETKKRID

SEQ ID NO: 15537 - protein, 59 aa, Artificial Sequence
  Synthetic
SKEEILKEITDRVRESRKRTKKLLDDVREELERSHRRLEKLIREVEKRLREVKRKVDES

SEQ ID NO: 15538 - protein, 53 aa, Artificial Sequence
  Synthetic
VVRDLRRLVKEDTDRARKVVRELEREVERDKEEVERIVDKAEKKVRELEERIR

SEQ ID NO: 15539 - protein, 56 aa, Artificial Sequence
  Synthetic
DEVEKAVADLRRLNEEHTRDIDKAARDLERLVKKHTDEVRKLVRDLEKLVKDLKDA

SEQ ID NO: 15540 - protein, 59 aa, Artificial Sequence
  Synthetic
EKLEELLKEVEETTRRSLRRLEELLRKVERAVRESHKELKKLLDEVREKVKKVLEELRR

SEQ ID NO: 15541 - protein, 56 aa, Artificial Sequence
  Synthetic
DEVEKAVRDLEKLNEEHTRRVEKVVTDLRDLVRRHTEEVRKLVDELRELVERLRRA

SEQ ID NO: 15542 - protein, 59 aa, Artificial Sequence
  Synthetic
KKLEKLLDDVRKTTETSHERLKRLLEEVEERVRRSHEELKDLLRKVKELVEKVLRELKE

SEQ ID NO: 15543 - protein, 56 aa, Artificial Sequence
  Synthetic
SEVEKLAKELRDLVREHTKRVRELIDELKKRVEDHTRKVEEIVKRLKKLVDDLRDA

SEQ ID NO: 15544 - protein, 59 aa, Artificial Sequence
  Synthetic
KKLEKLLKEVRELVKRSHDELKKLLDRVREAVEKSKRRLEKLLDTVRRLLEKVVRDLER

SEQ ID NO: 15545 - protein, 56 aa, Artificial Sequence
  Synthetic
SEAEKLVEELRRLNERHTRRVEEVVRRLDEEVKKHRKDVRELVRELRKLVDELRKA

SEQ ID NO: 15546 - protein, 59 aa, Artificial Sequence
  Synthetic
EKLEELLREVEETTEKSHRDLKRLLDRVREKVEDSHKELEELLKEAKDRVDRVLEELRR

SEQ ID NO: 15547 - protein, 60 aa, Artificial Sequence
  Synthetic
SLEDKVRDDVRKLLAEAKKVADDLRKVVEDHRKTVEDVIREIRRRVEEHLKKLKELIDAG

SEQ ID NO: 15548 - protein, 56 aa, Artificial Sequence
  Synthetic
DRVLKRIEEEIRRLLKELREIVKDLERLDRELTDELRKLVEEVRRLSETVLDEARK

SEQ ID NO: 15549 - protein, 59 aa, Artificial Sequence
  Synthetic
SLDEDVAEKMKELEKENKDLLDTIRRLIEELEKHARELLKRIEDLIRELTEDAKRLEDS

SEQ ID NO: 15550 - protein, 56 aa, Artificial Sequence
  Synthetic
RRILEEIRRTNEELTERVRDLVEEMRKTSEELLKEVRKIADEVRRTVEEALKRLEK

SEQ ID NO: 15551 - protein, 61 aa, Artificial Sequence
  Synthetic
DEAEKILRDAKRLVEELSKKLEDNLREIKEVIDRLSEELDRNLKEHRDLIRKLEEDMDRKG

SEQ ID NO: 15552 - protein, 55 aa, Artificial Sequence
  Synthetic
EERAREVEEDIKRAEEEVERSIRESKKRTRDAEREVRESKKKSEDHIREVEKRIR

SEQ ID NO: 15553 - protein, 61 aa, Artificial Sequence
  Synthetic
SELEELLKELKEIVERSADHLRRSNDDLRKIIEEVTKTLEKILEDLKRIVEEVVDRARKKV

SEQ ID NO: 15554 - protein, 56 aa, Artificial Sequence
  Synthetic
EEELKKKLKELKDRAKETNERHRRDVERLMEKLRRDLERLDREVKDLEKKLREEEK

SEQ ID NO: 15555 - protein, 56 aa, Artificial Sequence
  Synthetic
SDREEIKRRVEEEAKKSRENLKETLREVDERVRDSERNLKRHHEEVKKAIDDLRRS

SEQ ID NO: 15556 - protein, 56 aa, Artificial Sequence
  Synthetic
KRILDDVRRLLEELKERYRRIVDEIKKLLERLKEAYKRNLDRVRELIERIEKEIRD

SEQ ID NO: 15557 - protein, 59 aa, Artificial Sequence
  Synthetic
SELEEVKERIERLVRRHKEELEKVRREIEREVKKHEKDLEDLERRSREHIETAERLLAE

SEQ ID NO: 15558 - protein, 56 aa, Artificial Sequence
  Synthetic
DRILEEARRLLDRLREENEKVLKEAEDMLKRLEDENRKMLEENEKLLKELKKEVDK

SEQ ID NO: 15559 - protein, 59 aa, Artificial Sequence
  Synthetic
SEVEEVLKTIEKKDEEHKRELERVKEEVDEDAKRHRERLKKVDRDVKEEIKRLRKLLED

SEQ ID NO: 15560 - protein, 56 aa, Artificial Sequence
  Synthetic
EKILEEIKRRLDELRKRNEDLLRRVKELLDELREENRRLLEDAKRLLEEVLKRARD

SEQ ID NO: 15561 - protein, 59 aa, Artificial Sequence
  Synthetic
SELEEVEKKVREDARRHKEELRRVEEEVKRNAEKHRDELRRVREDIERKIRTLRELLKE

SEQ ID NO: 15562 - protein, 56 aa, Artificial Sequence
  Synthetic
EEILRRVKKLLDELRDENRRLLERVRELLERLREENERVLREVKKLLDEVKREAEK

SEQ ID NO: 15563 - protein, 59 aa, Artificial Sequence
  Synthetic
SEREKLLKELKDNLDESRRRVEELLKRIKENLEEVKDRAKKTLDDLKRDIEELRKLVER

SEQ ID NO: 15564 - protein, 59 aa, Artificial Sequence
  Synthetic
EDVKRRLRDLSRRLAREHEKVIEKLRRLSDELEKIHREIEERLERLSDELRKEADKARK

SEQ ID NO: 15565 - protein, 61 aa, Artificial Sequence
  Synthetic
DEARELLKRLREINEKLKKDVEEIERRLEKYNRDVKRKLDDSIRELKEKLDRLRERIRDEG

SEQ ID NO: 15566 - protein, 59 aa, Artificial Sequence
  Synthetic
EDVRRAVEELVRRHKDTVKKIEESVRRLVEEHKRTVKEALDRSRRIAEEIKRVLDEAAR

SEQ ID NO: 15567 - protein, 60 aa, Artificial Sequence
  Synthetic
SEEEKLLTELKKLNDDLERRVRKSLDEIRRYNEKMREDVRRSDREVREEKKRLDEKLKKD

SEQ ID NO: 15568 - protein, 59 aa, Artificial Sequence
  Synthetic
EEALKKVRELVERHKRTVDEALEKSERLLREHERTVDEVLDRSRRAVEEVKKTLDDARK

SEQ ID NO: 15569 - protein, 60 aa, Artificial Sequence
  Synthetic
REAEEVRRRIEESHEEVRRRARKDERDLEESHKRLEEKAKELKDELRKILKDIDDLAKSN

SEQ ID NO: 15570 - protein, 59 aa, Artificial Sequence
  Synthetic
EDVLRDIEKLVRDNEEALDRILKRTKELVDRNLEAIDRILKEVEELVRRIKELLDRAKK

SEQ ID NO: 15571 - protein, 61 aa, Artificial Sequence
  Synthetic
SEVEEVLERLKRKLDEIERESRESAKKIRREIERIEKEARDSLRRLKKLIKEIEDRVRRDG

SEQ ID NO: 15572 - protein, 56 aa, Artificial Sequence
  Synthetic
REELEKLLKRLEEVVRESEKEIEDLLRRVRELIERIKREHEKILKEAEEVIRRVKK

SEQ ID NO: 15573 - protein, 61 aa, Artificial Sequence
  Synthetic
REVEEVLRELEEHIERSKRKSEESLKEIRRRIEEIEERSRRSLTELKKRIDDIKRRVEKDG

SEQ ID NO: 15574 - protein, 56 aa, Artificial Sequence
  Synthetic
KEDLKRLLDKVTEVHKESAKEIRKLLDEARKVIEDSLRAIRDILRKIKETIDRDKT

SEQ ID NO: 15575 - protein, 61 aa, Artificial Sequence
  Synthetic
EEVERVLEKLKRHIDDSRRKSKRSVDEIRKHIERSKRRSEESVERVKRELERIEEKVRREG

SEQ ID NO: 15576 - protein, 56 aa, Artificial Sequence
  Synthetic
EEELKKLLEEAEKVHRDSKRELRKLVKEARDVHRESMETVKRLLDELEREIRRAET

SEQ ID NO: 15577 - protein, 61 aa, Artificial Sequence
  Synthetic
SEDEEALKKLKEHIDRSREESKRSLDRVKREIERIREEIERDLRRLREELKKIEDRLRRDG

SEQ ID NO: 15578 - protein, 56 aa, Artificial Sequence
  Synthetic
EDELRKLLEDAKRVHKRSKDELKRLLEEAEKVIRDAKRKIKKLLDELRKVLEDARR

SEQ ID NO: 15579 - protein, 61 aa, Artificial Sequence
  Synthetic
DEVRRVLEELKEHIKRSEKRVRENEEEIRRHIEKSKRDSDESLKELARLIKKIEDDVRREG

SEQ ID NO: 15580 - protein, 56 aa, Artificial Sequence
  Synthetic
EEELKKILDEAEERHRRIEERHKDLLRKAEEVHRDSLRRLREILRRAEEVIRREKT

SEQ ID NO: 15581 - protein, 61 aa, Artificial Sequence
  Synthetic
KEVEEDLERLKKHTEDTRKRARDNLERIKEELEEIRKESEDSARKVRRDIEEIKRRVDETG

SEQ ID NO: 15582 - protein, 56 aa, Artificial Sequence
  Synthetic
ERELEKLLKEHEKTIRDIEEEHRRLLKELKDVVRESSRELEELLKEAEDVIRRVKK

SEQ ID NO: 15583 - protein, 61 aa, Artificial Sequence
  Synthetic
DEVREALKRLEDETRKNKKESDKSLERLKEESKKNKDESDKSVKNIEDKIKKLKEDLDRDG

SEQ ID NO: 15584 - protein, 59 aa, Artificial Sequence
  Synthetic
EEVKRALDELVKDHRRVLEESARRIDEIVERHRRLLDDSLRRIAELVRRVEETLREERR

SEQ ID NO: 15585 - protein, 60 aa, Artificial Sequence
  Synthetic
DEVEKALKELEDDLRELKKRSEESLKNVEEEIKRAKKELDESLDNLRKKIEELKRRLEKD

SEQ ID NO: 15586 - protein, 59 aa, Artificial Sequence
  Synthetic
EEVLRKLETIVRKIREELDRSKKKLEKLIEEAKRELERVLKEHEDLVKRVRDVLEDARR

SEQ ID NO: 15587 - protein, 61 aa, Artificial Sequence
  Synthetic
DDVRETLTRLRKETERNKRESDKSLENLKRKSEDNKRKIEESLKNMKRRIDEVKRRAEKDG

SEQ ID NO: 15588 - protein, 59 aa, Artificial Sequence
  Synthetic
EEVKKELDEILRRHKEVLRESERRLEKLLRDHRRRLEEALEEHKKLIDEAEETLKRIRD

SEQ ID NO: 15589 - protein, 61 aa, Artificial Sequence
  Synthetic
SEVEKALKELEDKTRKNKEDSERSLDKLRKDIEELRKKAERSIRNMRDKLRKLRDDVRKEG

SEQ ID NO: 15590 - protein, 59 aa, Artificial Sequence
  Synthetic
EEARRKLKELVDRHEEVLRRSLERLKRLVEEVRRTLEKILRDHERLLDELRRDLEKDRK

SEQ ID NO: 15591 - protein, 61 aa, Artificial Sequence
  Synthetic
DEVEERLRELEETTKENKRRAERSLENVRKKSRDNDKRIKESLDNIRREIKRLRDKVRKDG

SEQ ID NO: 15592 - protein, 59 aa, Artificial Sequence
  Synthetic
REVLEKLKEIVERHEEVLRRIKKKHEDLVREHRKRLEEARKRHEKLVREAEKTLDDVRR

SEQ ID NO: 15593 - protein, 59 aa, Artificial Sequence
  Synthetic
EEVERILDELRRRNEDMRRRSEENERELRKRNTELRKKVEDSLRRLREDLKRIKKLVEE

SEQ ID NO: 15594 - protein, 59 aa, Artificial Sequence
  Synthetic
EEVTKALEELVRRHRKTLEESLRKAEKVLRDHKESLERSEKKLKELMEEVKKLLDDARR

SEQ ID NO: 15595 - protein, 60 aa, Artificial Sequence
  Synthetic
SREDEIRKRLEESLERVKKIIEDIKRRIDESLERIKELLKEIDERSKRSLEKIRRKIERE

SEQ ID NO: 15596 - protein, 56 aa, Artificial Sequence
  Synthetic
EELLRRARKAHEDLLREVKRRIERAEEEHKRLLDELRKVVERSKTEIKKLLDELRK

SEQ ID NO: 15597 - protein, 63 aa, Artificial Sequence
  Synthetic
SRVEDVERKLRRKLEELKEDIERLREESRRSLEELERDSDRNRRESEDSLRRVEERIRRIKDD

SEQ ID NO: 15598 - protein, 56 aa, Artificial Sequence
  Synthetic
RETLRRVEREIERLLRELEETLKRSEEELKRIVDEHRKLLERSKRELEKLVDEVRK

SEQ ID NO: 15599 - protein, 61 aa, Artificial Sequence
  Synthetic
REIEEVLKRVEKVVRDDSRRNKEVLTRNRRKVERWKETLEDVLRRVEKAVRELRKDAEDRL

SEQ ID NO: 15600 - protein, 59 aa, Artificial Sequence
  Synthetic
EDILREVEKKLKELLDRSRELSDEVRKRSDESNKEIKKELDRARDELRRLLERIEEELN

SEQ ID NO: 15601 - protein, 61 aa, Artificial Sequence
  Synthetic
DEIEKVLEEVERVVEEDERRNRKVLEENKRLVDEWDRRVREVLKDVKRRVDELDTRARRDL

SEQ ID NO: 15602 - protein, 59 aa, Artificial Sequence
  Synthetic
KEILDRVKERLERLLEESRELSERVKREIEETNERIARELERVMETLKKLLKDIEDELK

SEQ ID NO: 15603 - protein, 61 aa, Artificial Sequence
  Synthetic
KEAEDVLKKVDTDVTRDDEDNRKLLEDNRRSVEEDERRNRRVLEEVEKRVRDLAERVKRDL

SEQ ID NO: 15604 - protein, 59 aa, Artificial Sequence
  Synthetic
REILKRVTEELERLLAESERLSEEAEERVRRSDDTSRRLSEEVRKELEELLRRIEERLR

SEQ ID NO: 15605 - protein, 61 aa, Artificial Sequence
  Synthetic
REVEEVLKRVKETVEKDREDNTRVLERNRESVKEDDDRNRKVLKRVRDEVRKLLEEAKRDL

SEQ ID NO: 15606 - protein, 59 aa, Artificial Sequence
  Synthetic
EEILKRIEEELKRLLEESRELSKEVEDRVRKSDKKSRDLSEKVKKDLKELTDEIRKRLK

SEQ ID NO: 15607 - protein, 61 aa, Artificial Sequence
  Synthetic
SEIEDILERVREEVDKDRRKNDEVLRENERLVKKDDDDNAKADEDVRRKVTELEKRARREL

SEQ ID NO: 15608 - protein, 59 aa, Artificial Sequence
  Synthetic
EEILKRVAKRLKELLEESKRLSDEVTKRSRDTDEESERLSRKVDKEVKDLLKEIERELE

SEQ ID NO: 15609 - protein, 61 aa, Artificial Sequence
  Synthetic
SEVEEMEERLRKLDEDSRRLSEDVKRRLDKINKEIKDLLDDVRRKLKEMLDKLTKDLRDLK

SEQ ID NO: 15610 - protein, 62 aa, Artificial Sequence
  Synthetic
KRAEDKVRDVLRDNERTLKKDEDDNKRVLDEDEKRLREWEERARRVLEEVRRRLKELVEEVR

SEQ ID NO: 15611 - protein, 61 aa, Artificial Sequence
  Synthetic
REVDKAREDLRRVDDELRKILERVRRELEKLDKESEERSRRLARDLDRLLEELERDLKDNK

SEQ ID NO: 15612 - protein, 62 aa, Artificial Sequence
  Synthetic
REVERKVREVLKDNERTLRELRDTIRKVLEDNDKTLREDVRRNEEVLRRVDETLRELKKRVE

SEQ ID NO: 15613 - protein, 60 aa, Artificial Sequence
  Synthetic
SEVDKVKEDLDEVDKDSRRISREMEERLKELDKRSREISDRVVRELEKILKEIEDLLRDL

SEQ ID NO: 15614 - protein, 62 aa, Artificial Sequence
  Synthetic
KEARDKIRRVLEDNERTLREDIEDNRKVLEDNDKRLKDDERKNREVLKRVDETLKELDERVK

SEQ ID NO: 15615 - protein, 61 aa, Artificial Sequence
  Synthetic
DELRELEERLRRSVEEIKRDLKRIHDENREAVERSERKSKKILEELKREVEDVKRELREKL

SEQ ID NO: 15616 - protein, 59 aa, Artificial Sequence
  Synthetic
EKLVREIERRVRKMEEDVRELVKTIEKRSRDVIKKSEDILKRIKERVEELEKRVRDAVR

SEQ ID NO: 15617 - protein, 61 aa, Artificial Sequence
  Synthetic
DELRELLETLRDEVRKDDKRNEDIHRENRKRVEESRRRSEKILRDLREVVKRLEDELRKKL

SEQ ID NO: 15618 - protein, 59 aa, Artificial Sequence
  Synthetic
EELLKRIEKRVRDMIRRSRTLSARLEDLSRELDERSKRVVEDLKRRIDEAIKELEKEVE

SEQ ID NO: 15619 - protein, 59 aa, Artificial Sequence
  Synthetic
DETEEVAKKIKELIERSRELVKKVKEKIDRLNEEIEKLVREVEKTIKELTDRIEELRKR

SEQ ID NO: 15620 - protein, 58 aa, Artificial Sequence
  Synthetic
EEMKKLLDDLRKAVDESRRRSEEILKENRKRVEKWREDLRRLLEKVKEDLDRIRERLR

SEQ ID NO: 15621 - protein, 59 aa, Artificial Sequence
  Synthetic
SEVEEAKKTLDELNRDIAKKVEDVEREIKRMIEESERLTREVEERIRRLTKKIEDLRRG

SEQ ID NO: 15622 - protein, 58 aa, Artificial Sequence
  Synthetic
ERVKKILEENKRDAERWKRRLKKLLDDVRRLVKEDDDRNEELLREVTERVRRIEEKLD

SEQ ID NO: 15623 - protein, 59 aa, Artificial Sequence
  Synthetic
SEVEKVKEELKKLNKEIADSSDEVDKDIERLIRESRKLTEDVRREIKRLIERIDELRRA

SEQ ID NO: 15624 - protein, 58 aa, Artificial Sequence
  Synthetic
EEAKRILDENKKLVREWEEKSRAVLEKVKKLVKRDDDENKKLLDDVKKLVDEMRERAR

SEQ ID NO: 15625 - protein, 60 aa, Artificial Sequence
  Synthetic
DLEREIRKIIEEAKKELERVNDEIRRIIEEMRRRSEESNKRIREIIERARRRLEELIRRG

SEQ ID NO: 15626 - protein, 58 aa, Artificial Sequence
  Synthetic
EEVKKLLTDLKRLVDEIRKHNKRLLDELRKEVEKSERENRRLLEEVRRTVDEMRERAR

SEQ ID NO: 15627 - protein, 60 aa, Artificial Sequence
  Synthetic
SAEDKARKIAEDAKKEAEDSNRDAHRIAEEAKRRARKINEEARELIERAKKELTRLRREG

SEQ ID NO: 15628 - protein, 58 aa, Artificial Sequence
  Synthetic
EEAKKLLDELRKAAEDIRRNNEEALKDLRRAAEEIRRHNEELLRRAREAAKKARDDAE

SEQ ID NO: 15629 - protein, 60 aa, Artificial Sequence
  Synthetic
SAEEAVKRVEELVRRVKERNKRLVEDVEREVRRVKKRSEETNRRVKKLVERVKEDLDKRV

SEQ ID NO: 15630 - protein, 59 aa, Artificial Sequence
  Synthetic
KDKLEEVLREVRDRLADVERKSERVVEEVERLLREVVRKNEDVLRRIEELLRDVEEKAR

SEQ ID NO: 15631 - protein, 60 aa, Artificial Sequence
  Synthetic
SVEELVREVEKRARKVKRDSDKTNKDSTKLVKEVKDRSRRTNEEVKKEVERVKEDLEKRV

SEQ ID NO: 15632 - protein, 59 aa, Artificial Sequence
  Synthetic
EDKLKEVVDRIRKLLEDVKRENEDVKRRSRELAERVREENDKVSKEIRELLEEVERRAK

SEQ ID NO: 15633 - protein, 60 aa, Artificial Sequence
  Synthetic
SAEEMREEVKRLVDKNRKDNREVEKKSTRLAEDVKRKSEETNRKIREEVERVKKDLEERV

SEQ ID NO: 15634 - protein, 59 aa, Artificial Sequence
  Synthetic
EEKLKEVLDEVRRLIKEINDHSREVSKTSEKLLRDVLKKNEDVLREIERLLEEVRRRIK

SEQ ID NO: 15635 - protein, 60 aa, Artificial Sequence
  Synthetic
REVEEITKEIREMNEESKRLLEEVREKIERLSRESNRLLEDSKREIDEAIRRVEELLDKE

SEQ ID NO: 15636 - protein, 56 aa, Artificial Sequence
  Synthetic
KDIITEIERTNDETEERVRDIERRIKESSDRNDKRAKEISERIKRLLEEVDKKVKE

SEQ ID NO: 15637 - protein, 60 aa, Artificial Sequence
  Synthetic
DLEELVKEVERRVRRNKTETDRLVEEVERSVRENRRRIEELVRRVEKEVRRIKEDLKRKL

SEQ ID NO: 15638 - protein, 59 aa, Artificial Sequence
  Synthetic
KDVLEKVAREIKRLIEESNRLDKEVEDEVREMSKDVNRELERIAEEIEKVLRDVERKLR

SEQ ID NO: 15639 - protein, 57 aa, Artificial Sequence
  Synthetic
SLEELLKEVKKLVEDVHRKNKKNVEDVRRLVERLRKENEENVEEVRREVKKVKEEIG

SEQ ID NO: 15640 - protein, 56 aa, Artificial Sequence
  Synthetic
LEEVRRRVEELVTDVDRSSKENHRRIRKVVREVERTTEENHRRIRDIVRRVREEAK

SEQ ID NO: 15641 - protein, 56 aa, Artificial Sequence
  Synthetic
SEIEKAVRELEELVKDNERKSKKSVEDSERIVKEIRDRVRRVVERVRKVVEDIARA

SEQ ID NO: 15642 - protein, 59 aa, Artificial Sequence
  Synthetic
DDELRKVVERARDLIRKIREESKRSHDRITKLAEDIKRELEKIERRLEKLAEELERKAR

SEQ ID NO: 15643 - protein, 56 aa, Artificial Sequence
  Synthetic
SEVDELRKEVEEMVKRNKDETDKSVKESKEIVDEIRKRIKEVVDEVRRFVEDIRRE

SEQ ID NO: 15644 - protein, 59 aa, Artificial Sequence
  Synthetic
SRALEDVARRLRELLKRINDKTRESHKEIKRLADEIRKKLEDIVRELEKLLREIKERAR

SEQ ID NO: 15645 - protein, 56 aa, Artificial Sequence
  Synthetic
SEVDEVRERLERVVRRIEREVEKSERDSERIVEKNKRDTDRVDREIEKVVKKIRDR

SEQ ID NO: 15646 - protein, 59 aa, Artificial Sequence
  Synthetic
SRALEEIEKRARELLKRITELLRESHERIKRLAEEINKKTEKVVRDIRKLLKEIEDKVT

SEQ ID NO: 15647 - protein, 57 aa, Artificial Sequence
  Synthetic
SEIERLREELERVVRAIERTVTESVRESKEMVDRNKRATEKSVRDSEDMVREIEERG

SEQ ID NO: 15648 - protein, 59 aa, Artificial Sequence
  Synthetic
SRELERVAKEARDLLREIKKLLDESTETIRRLVKEINDETERSHRKITELAKRLKEEAK

SEQ ID NO: 15649 - protein, 56 aa, Artificial Sequence
  Synthetic
DEVRELVEEVERVVKRNKDESKKSEEESREIVREIEKRVEDLVRTVEEVVKEIERK

SEQ ID NO: 15650 - protein, 59 aa, Artificial Sequence
  Synthetic
SRELEKVADTLRKLLKEINEKLERSVRRIRELAKEIKDELRRIEEELRKLAKELDDEAK

SEQ ID NO: 15651 - protein, 59 aa, Artificial Sequence
  Synthetic
DRTREVMERIERLLEDSRRKTDKVRREIRKLLEDVHDKTRRVAKEIRDLLDEIRRLLES

SEQ ID NO: 15652 - protein, 55 aa, Artificial Sequence
  Synthetic
EEVVKKARKKVRENAEEAEEVRRRIRRSVEENRKELRRLEKELKDVLDEIRERVR

SEQ ID NO: 15653 - protein, 59 aa, Artificial Sequence
  Synthetic
RELEEVRKDIERLLKEVEDTNRRAKERVKRLLEEVHDDTRRAVERIRKLLDEIRKLLEG

SEQ ID NO: 15654 - protein, 55 aa, Artificial Sequence
  Synthetic
EEVVKEIEKMLEKIARHARKSDKEAKESVEDNRRRLEKVRKEVEDMLDEIRERAR

SEQ ID NO: 15655 - protein, 59 aa, Artificial Sequence
  Synthetic
DREKEVADRIRKLLEEIREESERVAKEIRELIKEVHKRTKEVAEEIRRLLKEVEELLRN

SEQ ID NO: 15656 - protein, 55 aa, Artificial Sequence
  Synthetic
EEVVKEIERRLRENERKLRELEKEIKKLVEDNRTRLRELEDEIRRVLKKITDEVT

SEQ ID NO: 15657 - protein, 57 aa, Artificial Sequence
  Synthetic
SELEKAVEDSRRLDRRVEETLRDVTRRVRETNKEVEDMLEEVRERAERLLREIEEKL

SEQ ID NO: 15658 - protein, 59 aa, Artificial Sequence
  Synthetic
EDELRKVIDENRKSVETIEEELRRVEKEDEDTLREIEEKLRKAIEELEKKLKEILDRLR

SEQ ID NO: 15659 - protein, 59 aa, Artificial Sequence
  Synthetic
REREELVERVRELLKEVEDRDREMVERSERLNERIRERDKEVEDRSRKLDEDIERLLRA

SEQ ID NO: 15660 - protein, 55 aa, Artificial Sequence
  Synthetic
EEVLKEVKDAVDTLKKHSEDVIRKDEESVRDLRRHSEDVLRKNKEMVDDIKAKAE

SEQ ID NO: 15661 - protein, 63 aa, Artificial Sequence
  Synthetic
DEEDKLREVLKDVERRVREMLRENNELIREVAETSERLLRENNELIERVRKEVTRLLKELEKV

SEQ ID NO: 15662 - protein, 55 aa, Artificial Sequence
  Synthetic
REIVETIRKILREIEEHAERNKTRLEEENKKVREHVERNKKDLEETLKEVEDRAR

SEQ ID NO: 15663 - protein, 63 aa, Artificial Sequence
  Synthetic
SKEDKLREELKEVEKTVRELLKRNNELIERVREEVERRLEENNRLIKEVKDRIDDLLRKLKDD

SEQ ID NO: 15664 - protein, 55 aa, Artificial Sequence
  Synthetic
REIVKTIKEILDEIRRHLERNKDRLEKELTRVRETAEKNKRDLEKVLEDVDRKAK

SEQ ID NO: 15665 - protein, 60 aa, Artificial Sequence
  Synthetic
DEAEKLEREVRKELEENREELERSTEESERLLKHNEDELRKSEEESKKLLREVEKELRRV

SEQ ID NO: 15666 - protein, 59 aa, Artificial Sequence
  Synthetic
KRVLDEVVKEIRRLIEEVKRTTKEMNKKIRKLFEESNRKLEEAHRDIRRKAERVKRELK

SEQ ID NO: 15667 - protein, 60 aa, Artificial Sequence
  Synthetic
KELDEIREEVDRVLRENERRLRTVKKEARDVLEHNRKRLEELRRKIEEVLKEIEEELKRV

SEQ ID NO: 15668 - protein, 59 aa, Artificial Sequence
  Synthetic
EEVLRRVLERIRRLIERVKERTKRMTDDMRRLIEESNDKLRRAEERIRKLLEEVKRTLK

SEQ ID NO: 15669 - protein, 60 aa, Artificial Sequence
  Synthetic
KKVEDIKREAEKVIKESEESIRRNERELDEVIKESERSIRRNERELERVLKELRDSVARL

SEQ ID NO: 15670 - protein, 55 aa, Artificial Sequence
  Synthetic
DRIREELKKVADEIRETNKRIHEESKRVVDEVRRTNEEIHKRSAKVVKDIKDKIK

SEQ ID NO: 15671 - protein, 60 aa, Artificial Sequence
  Synthetic
EEVERITEDAKRVIDESRKTIKRNEDDLRRVIEESRETVERNRKRLEEVLRELEERVRRL

SEQ ID NO: 15672 - protein, 55 aa, Artificial Sequence
  Synthetic
KRIEEELKRVAEEVKKINEDIHRRSKEEVDRVREINEKIHRDSERVAEEVRRRIK

SEQ ID NO: 15673 - protein, 57 aa, Artificial Sequence
  Synthetic
EELERLKEEVEEIVRRLKRELERIEEEIAKMVRDSEKSLEEDEREVRKVVEELRRRG

SEQ ID NO: 15674 - protein, 59 aa, Artificial Sequence
  Synthetic
EEILRRVKEEVEKVARDIKAIIEKVAREVKEVLDRIREVNKRAHEETRKVADEIEKRAK

SEQ ID NO: 15675 - protein, 56 aa, Artificial Sequence
  Synthetic
DEVERIAKELTDVLDRIRKAVETDKEEIKRVLKEIEEAVRTNEEKLKDALRKIREG

SEQ ID NO: 15676 - protein, 59 aa, Artificial Sequence
  Synthetic
ERALERVEEKARELVRRVDELLRRSHERTKELAERVRRLLKKSDEETERLARDVERKIK

SEQ ID NO: 15677 - protein, 56 aa, Artificial Sequence
  Synthetic
SEVERITERLKEVLKEIKELVETNSEKLKRVLEEIKKAVEDNTRTIKKVLEEITRA

SEQ ID NO: 15678 - protein, 59 aa, Artificial Sequence
  Synthetic
EEMLKRVEDEARRLTERVRKLIEDSDRETEKLVRRVRELVKRSHEKVKELVDRVRKRIE

SEQ ID NO: 15679 - protein, 56 aa, Artificial Sequence
  Synthetic
SEVERIAEEVKRVLEKIRRDVEENRKRIEEALKRIEKELRDNERRLREVLDEIRKR

SEQ ID NO: 15680 - protein, 59 aa, Artificial Sequence
  Synthetic
EDALRAVEEEIRKLEDEVRRLIETSHKEVEDLAKEVTDLLRESNERTEDLRREVDAKRR

SEQ ID NO: 15681 - protein, 64 aa, Artificial Sequence
  Synthetic
SDEERLLRTITRVLEENKKSVDDDLKKNEDVLDENRRRVERWEEALRELLKRVEDKVKDLKKDG

SEQ ID NO: 15682 - protein, 56 aa, Artificial Sequence
  Synthetic
TDEIRRVLEKVKEELDRTDEKSRDLSRKVRDRIRESNREIEKLLEEVRERLERETK

SEQ ID NO: 15683 - protein, 64 aa, Artificial Sequence
  Synthetic
READELRTRAEKALRDNRESVERLKRELDRVLKENERTVRELKERVKEVLKDVDKKVKDLKKEG

SEQ ID NO: 15684 - protein, 56 aa, Artificial Sequence
  Synthetic
REEIRKVLEDVRREVEETDDRIRKVLERARRESEKVDRELKKELERVRKELEEETK

SEQ ID NO: 15685 - protein, 59 aa, Artificial Sequence
  Synthetic
DRERRVLEELRKLSEDSKRLLERIRERMRRLAEETKRRARDILREVEELSRRVKELLDG

SEQ ID NO: 15686 - protein, 55 aa, Artificial Sequence
  Synthetic
EEVKDDVRRSSEEVKEEVERLIREAKKSTDEVRELLKELEKRLRESIEESKRKAE

SEQ ID NO: 15687 - protein, 57 aa, Artificial Sequence
  Synthetic
EEVKRMEDRLEEVAKRADEESKKVMDELEKIVRDVLRESKRLTEELRRIADRVRKEL

SEQ ID NO: 15688 - protein, 59 aa, Artificial Sequence
  Synthetic
KKELDRIEKRVREIKKRSEDSVRTIRERVRDAKRKLERSVEEDKREVKEIKERLEREAR

SEQ ID NO: 15689 - protein, 57 aa, Artificial Sequence
  Synthetic
SEVDDLKRKLDEVVRRAKEESKEISERLEEIVRDAERLLKELHEEDERIVDRARKEI

SEQ ID NO: 15690 - protein, 59 aa, Artificial Sequence
  Synthetic
RDKLEKIRDAVRKVKEELERSLEKDRKRVTEIEEKLKKLVEENRRTSKRVKEELEEKVR

SEQ ID NO: 15691 - protein, 60 aa, Artificial Sequence
  Synthetic
RELEEIKKRVEDIMRRIEDLLRENEKKIDKVRKDIRKSLEENKRKVEEVRKDLKRLLDER

SEQ ID NO: 15692 - protein, 55 aa, Artificial Sequence
  Synthetic
EEVKKEIERLAKKLEEELERSNRESDRLVREARKHNEESDRRSEELARRVRERLR

SEQ ID NO: 15693 - protein, 60 aa, Artificial Sequence
  Synthetic
KREEDVKRDLKRVADESRKSDEDIKRRLDRLVKEIRELHKKTTDELKKVADEVRDRLRKV

SEQ ID NO: 15694 - protein, 55 aa, Artificial Sequence
  Synthetic
DELREDVKRVEDENRTSLREIKRAIEKVLDESRKLVEENRRRAEKIIKEVEDTLR

SEQ ID NO: 15695 - protein, 60 aa, Artificial Sequence
  Synthetic
REEEEVTEELKRLADKSRKSDEDIERTDRRVTEEIERLHEETTRELEKVRRDVDRELKKV

SEQ ID NO: 15696 - protein, 55 aa, Artificial Sequence
  Synthetic
DELKKEVRKILEENKRSLERIRRHSTRVEEKSRKLIKENDDRLKKVIEDVRRKLK

SEQ ID NO: 15697 - protein, 60 aa, Artificial Sequence
  Synthetic
SEKDKVTKELEDVARESRESDKEIKRELDEVVEESERLLREIRRRLEKVAEEVRRALEKV

SEQ ID NO: 15698 - protein, 55 aa, Artificial Sequence
  Synthetic
EELKRRVEEIIRENEESVRRIAKRADDSNREIERLVDEIRRRAEEAIRRVTEKVR

SEQ ID NO: 15699 - protein, 60 aa, Artificial Sequence
  Synthetic
KEEDDVRRKLEKVVREIDKLHKESTERDRKVREDSEETDRRIKEELKKVVKEVRDRLREV

SEQ ID NO: 15700 - protein, 55 aa, Artificial Sequence
  Synthetic
EELKDEVRKATEKSEDLVRRNEEHSRRVIEENERTLKDIADEAERVIKEVEDRLR

SEQ ID NO: 15701 - protein, 60 aa, Artificial Sequence
  Synthetic
REDEEVTKELEEVIREIEELHERSTRKLKEVVDRSRELLDRVRRRLKEVVDRIRELLERV

SEQ ID NO: 15702 - protein, 55 aa, Artificial Sequence
  Synthetic
EELRKRVEEAIRKSEELVKENTERAKKSNEELERRVRELEERAKRAIEEVKEKIR

SEQ ID NO: 15703 - protein, 60 aa, Artificial Sequence
  Synthetic
SREEDVDRKLDEVIERSRRIDEEILRRDKEVVDEIRKLHKESTDRLKEVVDRVDKELKEV

SEQ ID NO: 15704 - protein, 55 aa, Artificial Sequence
  Synthetic
EELKKKVTEAIEENRESVEEIRRHSEEVKKESEKRVKENRDRARRAEERVEEMLR

SEQ ID NO: 15705 - protein, 60 aa, Artificial Sequence
  Synthetic
DREREVKKRLDEVRERIERLLRRVEEESRRVAEEIRRLIEEVRRRNKKVTEEIRELLKRL

SEQ ID NO: 15706 - protein, 55 aa, Artificial Sequence
  Synthetic
KELREELKKLERKIEKVAKEIHDHDKEVTERLEDLLRRITEHARKSDREIEETAR

SEQ ID NO: 15707 - protein, 60 aa, Artificial Sequence
  Synthetic
DEEEKITRDLEKVEDEIRRLLEEVRRLSKKVKEEITKLLEDVNRESEKAVRKVRETLKRL

SEQ ID NO: 15708 - protein, 55 aa, Artificial Sequence
  Synthetic
ERLRKRVTDVIRKLEEVLKDIHRHDKEAIEEAERRLEDNHRRNRRVLEELKRRAD

SEQ ID NO: 15709 - protein, 60 aa, Artificial Sequence
  Synthetic
SEEETVEELVRRAEEKSRRILEDSKKKVRDIERENDEILKRSRDRVKKAEDDLRRVVEKR

SEQ ID NO: 15710 - protein, 55 aa, Artificial Sequence
  Synthetic
ERILRELERVVEEIDREHERTKEELKKVADESRKAHRESERDLERVIREVRERLR

SEQ ID NO: 15711 - protein, 60 aa, Artificial Sequence
  Synthetic
SEVERVRKTVEEIKEKNERILKTSKDEVRRILEESERMLEESKKRVDEVREEAADVVRKR

SEQ ID NO: 15712 - protein, 55 aa, Artificial Sequence
  Synthetic
DRILEKLEEAAKRSDELHKRSRDDLRRVAEEIKKLHEETRRKLKKVVDEIRKKLK

SEQ ID NO: 15713 - protein, 61 aa, Artificial Sequence
  Synthetic
STLEEVRERVDRVKKKLKKLLEEVTEINERSKKEIDEILKESEDRVRKVKEDLKRVVKEDK

SEQ ID NO: 15714 - protein, 59 aa, Artificial Sequence
  Synthetic
EEVLERVLRELEELTRRVEKEIRDLLKRIEDSSRRVRELATESRKKLEDLVREIKERLT

SEQ ID NO: 15715 - protein, 59 aa, Artificial Sequence
  Synthetic
SSEEKVREEVERVREEITRLLRENEDTVRRVDEKAEKALRENKERVDRLREEVRKLLEK

SEQ ID NO: 15716 - protein, 59 aa, Artificial Sequence
  Synthetic
DDFVRKVTEELKKVTDRIRKLLEESRKHTERVRREAEKLLKEIKDETKKVEEEVRRRAK

SEQ ID NO: 15717 - protein, 59 aa, Artificial Sequence
  Synthetic
SSREKIKDDLRKAVEENRRLLREVRELLREMLERDERILREIERRLDEARKRLEEVARN

SEQ ID NO: 15718 - protein, 58 aa, Artificial Sequence
  Synthetic
RAVEELKKELRRLEEESRRAVEDLKRLLDELKERTDRVVKKLDETLRKLKEDVDRKAK

SEQ ID NO: 15719 - protein, 60 aa, Artificial Sequence
  Synthetic
REIDELRKELDEIRKRIEKVIEELKRHLDEVDKRAEDLAKELDDLTKTIERDAERRIRED

SEQ ID NO: 15720 - protein, 59 aa, Artificial Sequence
  Synthetic
DKVIREVEERVKRIKEDVDRVLEDNSREVERVKRKVDKMLKRNKDEADRIRKKMDDDLR

SEQ ID NO: 15721 - protein, 60 aa, Artificial Sequence
  Synthetic
SVIERLKEELKKIEEDARDMAKKLNKETEDILRRARKLARELEKHLEDVKRKIDELIKED

SEQ ID NO: 15722 - protein, 59 aa, Artificial Sequence
  Synthetic
KKMIEEVERDVRRIKKEVDRLLEENTERIEEIKKEVDELLKRNTDEVEKVKKKVDEDRK

SEQ ID NO: 15723 - protein, 59 aa, Artificial Sequence
  Synthetic
KIEEDLERSLKKSEDELKELRDRLRKSNKEVTDDAERIKKEVEDSNREVEKRVRDLERR

SEQ ID NO: 15724 - protein, 59 aa, Artificial Sequence
  Synthetic
SEEARKVLEENEEVVRRIVKKVEDILDDHRRVVKEVRDRIERLLKEHKKIVEDADKDLT

SEQ ID NO: 15725 - protein, 60 aa, Artificial Sequence
  Synthetic
REEEEVAKKLERAAEESRRLHEESKRDHERATDEIRRKAEATLRELKRVIDEIERLADER

SEQ ID NO: 15726 - protein, 55 aa, Artificial Sequence
  Synthetic
EEIRRRVETLERENRKAEEESRDKVRKSERRLEELNKRHEDLVRELEERLERKRK

SEQ ID NO: 15727 - protein, 60 aa, Artificial Sequence
  Synthetic
DEEEKVLRELEEVIRTSRRLHKRSLEELDRVLEESKALHRESKRALEDVTREITKLADDR

SEQ ID NO: 15728 - protein, 55 aa, Artificial Sequence
  Synthetic
ERIRKLVDDLRKENEKALRESKKRVEEIRRRNEEAIKDSKKDVEDLERDLERKRK

SEQ ID NO: 15729 - protein, 60 aa, Artificial Sequence
  Synthetic
SDEERVLEELKKVIKESRDLHKESLDDLRRVIEKSRRLHEESLERLRRAIEEIERLMDER

SEQ ID NO: 15730 - protein, 55 aa, Artificial Sequence
  Synthetic
EEIRDLVRTLEEDNKRMEERSRRTVRKLEKENDDARKESERLVEELERRLEEKRR

SEQ ID NO: 15731 - protein, 60 aa, Artificial Sequence
  Synthetic
RDVEEVKKRSDTTLKRIEELIRRVNERSKKSIKEIRDRAKEVEDEVRELARKIEEDARRR

SEQ ID NO: 15732 - protein, 59 aa, Artificial Sequence
  Synthetic
DEVVRELEKINDKSRKRVEDAVRSNEKLLEDSERDIRRVIERLKKLLEDLKRKLEEIER

SEQ ID NO: 15733 - protein, 60 aa, Artificial Sequence
  Synthetic
SDAERVMEESRRTIEKIKKDAKEMNERSRKTVDEIRERLERLLRELERIAEEIRRELEKR

SEQ ID NO: 15734 - protein, 59 aa, Artificial Sequence
  Synthetic
EEFVRELKKLNDKSRKDVEDLKRSNEEINEDSKRKVEEIIRRLEELLKEIRRELEDVER

SEQ ID NO: 15735 - protein, 60 aa, Artificial Sequence
  Synthetic
SVEEDLKRLVDEIRRRVEKVKRDLERIVDENRKRVEESKEESKKSVEEIERRVREAAKRI

SEQ ID NO: 15736 - protein, 59 aa, Artificial Sequence
  Synthetic
EKVADEVRKRLRKMIRDLEEVAREVKRELERLHEETERSSRDAKRRSDKMARDLERTEK

SEQ ID NO: 15737 - protein, 60 aa, Artificial Sequence
  Synthetic
SSEEKLRELVKRIKRRVEEIIRRLEESVERDRDEVRRSKERLEALVEEIRRRVDDIEKRI

SEQ ID NO: 15738 - protein, 59 aa, Artificial Sequence
  Synthetic
EKAVREVEEELRDMERKLEKVAEEVTRRSKEVTEKLRESSDRVEKELRRIIEELERVAK

SEQ ID NO: 15739 - protein, 60 aa, Artificial Sequence
  Synthetic
SVREDLKRLVKEIEDEVRKSKKDLDDSVREDKREVRESKEDSKRSVKRSEEEVRKIKKRT

SEQ ID NO: 15740 - protein, 59 aa, Artificial Sequence
  Synthetic
EEVAKRVRELLEEIMRRLRKTSEEARRRSKKITDDLRESSKKVREDSERLRKRLEEEAK

SEQ ID NO: 15741 - protein, 60 aa, Artificial Sequence
  Synthetic
DAERKITRLLEEIRRESKRSSEEIKKSLKENEDEVRRVVEEIRKRLREIEKEVKEVLDRL

SEQ ID NO: 15742 - protein, 59 aa, Artificial Sequence
  Synthetic
EKLVEEVLREVKRIIEENRTLSERVKEHNEKSHRESEELAKRVKELLKEIERDIRRLEK

SEQ ID NO: 15743 - protein, 55 aa, Artificial Sequence
  Synthetic
SDAERVLKESKESLEELERRVTEALKRSRDSLRRLKEVADEARRRLEEVLERIAR

SEQ ID NO: 15744 - protein, 59 aa, Artificial Sequence
  Synthetic
SEVKERLKRSLEETEKRVREVEERLKKTVEDTRKVVEDIERELERLLREVEEVVRRIEK

SEQ ID NO: 15745 - protein, 55 aa, Artificial Sequence
  Synthetic
EEAERMLRESEASLRRIEKIVREALEASRRTVEELKKVVERVLREVRKLIEEIEK

SEQ ID NO: 15746 - protein, 59 aa, Artificial Sequence
  Synthetic
DEVRERLKKTVEDSKRVVEKAEEDLRRSLEDTERLVREASRRLRDLLRELRRIVEEIKR

SEQ ID NO: 15747 - protein, 55 aa, Artificial Sequence
  Synthetic
SEDEKALRESKKTTDEIRKRVTEMEKRSREVVKEIRDIIERVLREVRRVLEEIRK

SEQ ID NO: 15748 - protein, 59 aa, Artificial Sequence
  Synthetic
SEAKKRLKDSLDRTRKTVEEMTRRLEKTVKETEDLLREARERLEELLRELERVADEKRR

SEQ ID NO: 15749 - protein, 55 aa, Artificial Sequence
  Synthetic
SEDEKVLRDSRKVLREIEEVVKEVLKRSKKLVEELEDIARRVLKESEDSNKEARD

SEQ ID NO: 15750 - protein, 59 aa, Artificial Sequence
  Synthetic
DEVERRLRKTVRDTKEVVDRAREKLERTVRTTEETVKEIEKRLEESLRRSREDVKEREK

SEQ ID NO: 15751 - protein, 60 aa, Artificial Sequence
  Synthetic
RVEDALRKLLDDVRRLVEEAERRLRTSNDKSRRLVEEAKRRLEESNERSEKLVRDVRRRI

SEQ ID NO: 15752 - protein, 59 aa, Artificial Sequence
  Synthetic
SKVVEEVLKELEELIKTAKKIIEDVLRASEDTIRRLEEIIRKVEEDSKRIIEEIERAAR

SEQ ID NO: 15753 - protein, 60 aa, Artificial Sequence
  Synthetic
SAEDKLRKLLDDARRTVKEVEERLKKLNKKLEEDVKRVKRELRESNKKSRELVEKVKREV

SEQ ID NO: 15754 - protein, 59 aa, Artificial Sequence
  Synthetic
SEVVEEVLEELKKLIETVKRRAKEVLDRSEETIREIRKRAEDVLRESERIIEDIERMTR

SEQ ID NO: 15755 - protein, 60 aa, Artificial Sequence
  Synthetic
KVEKRLTDLLKTVADEVKRVEDELRETVRESKEVVDKSRRDLERTVEESEKTVKDAERRV

SEQ ID NO: 15756 - protein, 59 aa, Artificial Sequence
  Synthetic
EEVVKKVEKEIRELLERLKEEADRVRERSKKILTDLKKSSEDVKRESERMLKKLEDEIR

SEQ ID NO: 15757 - protein, 60 aa, Artificial Sequence
  Synthetic
SVEERLEDLLREVTETLDTSRRRLEKLDREVDKKVKEVEKRLRETLKESEDTVRDVERRV

SEQ ID NO: 15758 - protein, 59 aa, Artificial Sequence
  Synthetic
EEVARRVEKELEDILRKLRKSSEEAERRIEEMLRRLDKVVKEMLKRSRDLLRTLEETTK

SEQ ID NO: 15759 - protein, 60 aa, Artificial Sequence
  Synthetic
SIREDVERLAEELDRKSREIATRAKRELDEILRKDKEISDRARKELEEILKKLKEIADRD

SEQ ID NO: 15760 - protein, 59 aa, Artificial Sequence
  Synthetic
KEVEKRLDDALKRNAEEVEDVKRKLKDVLREVERTVRESEKDLRRVLEEVERAVREIRR

SEQ ID NO: 15761 - protein, 55 aa, Artificial Sequence
  Synthetic
SEVDEVLKRSRDVLKRIDEIVKKVLTDSKRVLEDLRRIVKEVLDESKKVLEEIRK

SEQ ID NO: 15762 - protein, 60 aa, Artificial Sequence
  Synthetic
AEEVERAMRKSSDDLRRKLEEVERRLRKSSEESKKVLKDAEREIRRSSDELRKVLEDIRR

SEQ ID NO: 15763 - protein, 55 aa, Artificial Sequence
  Synthetic
SEVEDVLTKSRKVLKEIEEIARKVLEESKRVLEEIRRVVEEMERRSEDVLRELRR

SEQ ID NO: 15764 - protein, 60 aa, Artificial Sequence
  Synthetic
ADEVRDEVRKSSEELRRVLEEAEERIRRSSKESKELLKRVKERIEELSRRLEKVLREIEK

SEQ ID NO: 15765 - protein, 59 aa, Artificial Sequence
  Synthetic
DAEDELKKAEDRLRKSDEEAKKSIEDVKRELRRLLEESKKEIEKLIEELRRLLERAKEK

SEQ ID NO: 15766 - protein, 59 aa, Artificial Sequence
  Synthetic
EEVVERVLRKVERLLEENERLVKEVEDELRKLLEDLKRSSKKVRDEVKELAKRLRDEVR

SEQ ID NO: 15767 - protein, 59 aa, Artificial Sequence
  Synthetic
SAEERIEEVKERLRRSDEEAKRKIDRLVEELRRLLEESKKEAEKVKKELRKLLEEVKRK

SEQ ID NO: 15768 - protein, 59 aa, Artificial Sequence
  Synthetic
EEVVKRVEDELRRLLEENKKLVDDILDEVRRLLEELEKSSRKVKEDLDRLLEELRREDK

SEQ ID NO: 15769 - protein, 59 aa, Artificial Sequence
  Synthetic
SAAEEVKKRITDLLRKDEEVVKRASEAVERLLEDDKRVVEDVRREIEEILRTLEKVTRE

SEQ ID NO: 15770 - protein, 56 aa, Artificial Sequence
  Synthetic
KDDVKRAEDEVRKSHKKVEDDLRRLKEEVERSLKDTEDKARRAKEEVERLLRESER

SEQ ID NO: 15771 - protein, 59 aa, Artificial Sequence
  Synthetic
DEDDRVRKEVEKMLRDDDRIVKEIEKRLKDLLDRDRKVVREVRELVEELLRRLEKVIKD

SEQ ID NO: 15772 - protein, 56 aa, Artificial Sequence
  Synthetic
EEDVDRLRREVDKSNKDTKKILDEVRKEVEDSLRKTKKIIDDALRRVDELLKEAER

SEQ ID NO: 15773 - protein, 56 aa, Artificial Sequence
  Synthetic
SVEERVEDIKRSNEESNKRLREEVEKIKEELKEINKRVEDTVREIEKRLEELLRRV

SEQ ID NO: 15774 - protein, 59 aa, Artificial Sequence
  Synthetic
ERVVEEIDKIAKEVNTRNKKVVDEIRKRAEEVKEESKESLKRLRKIAEEVLEELKKRAT

SEQ ID NO: 15775 - protein, 56 aa, Artificial Sequence
  Synthetic
DLAEEVRKDVEDLERTNEKVVRDIRKLLEDLNREHKRVSDEIRKRIEELKEKLKRI

SEQ ID NO: 15776 - protein, 56 aa, Artificial Sequence
  Synthetic
DDDVRRIKKRAEDSHDRVKKELDRIAKSNEELLRKTEEEVRRLLEELEEILRRTRK

SEQ ID NO: 15777 - protein, 59 aa, Artificial Sequence
  Synthetic
DEVEEALRRVEESNRRVKEEVERAVERVKRSDDDVRRLVEEMEREVRKLIDDIRRLAEA

SEQ ID NO: 15778 - protein, 56 aa, Artificial Sequence
  Synthetic
KDEITELKKHSERLLEEAERLVRDLKRHSDELLEEVEERLRRLREDLKRLLDEVET

SEQ ID NO: 15779 - protein, 59 aa, Artificial Sequence
  Synthetic
SAVEKAVRDVERTNEEIRRVVEEVRKEAEKTHRDIRRVVEEARETAERLLREIEELAKK

SEQ ID NO: 15780 - protein, 56 aa, Artificial Sequence
  Synthetic
EEAVKRLKDENKKTLDEVREIVKRLAEENKRLLEEVEKTVRDLKRELEKLLREVAK

SEQ ID NO: 15781 - protein, 60 aa, Artificial Sequence
  Synthetic
KEVEDVVKEIEEVLDRLRKEVKKIKEDSDRLNEEIEKVVTDLVKELDRLLREIDDLIRKL

SEQ ID NO: 15782 - protein, 59 aa, Artificial Sequence
  Synthetic
DRARKTLEDLKRRIEELLRRVDETNERLKRHSDDLLRDVKRRLDEVRERIDRLLDKAER

SEQ ID NO: 15783 - protein, 61 aa, Artificial Sequence
  Synthetic
DEVDEAVKRLREILRRIREIVEKVRKESEDVNDEIRRIVEEVTKRSEDALRELRELIRRNK

SEQ ID NO: 15784 - protein, 59 aa, Artificial Sequence
  Synthetic
ERVREELRKVEEDIDRLLKEVTELNERLKRHSEKLLRDVTRENRRSKEAVTRILEEARR

SEQ ID NO: 15785 - protein, 60 aa, Artificial Sequence
  Synthetic
SEVEELLDRLREVNKRIREEVRKVTEESKKAIEEIKRIVDDMVDKVRKILEKLKELIRDN

SEQ ID NO: 15786 - protein, 59 aa, Artificial Sequence
  Synthetic
DKAREDLRRVKEHSERLLREVTKLNKDVEKELKELLDEVRERLKDLKRRIDKILEEAER

SEQ ID NO: 15787 - protein, 59 aa, Artificial Sequence
  Synthetic
SVRERVKDEMEKVLRDDKEVSKRVTDEARKVLEEHRKITDEVRRRSKELIRELKKVRDE

SEQ ID NO: 15788 - protein, 59 aa, Artificial Sequence
  Synthetic
EEVRRTVDEVRRRIDKSLEESKKLVEDISREITELLRRTTERNKESKREVDKILEDARK

SEQ ID NO: 15789 - protein, 59 aa, Artificial Sequence
  Synthetic
SIVERAEKELRRLLKEDEEVSDRVRKEVKRLLKEDKEILDDVRRRIEKILREIEEVARR

SEQ ID NO: 15790 - protein, 59 aa, Artificial Sequence
  Synthetic
EDVRRIIKEIKERVKKSLDESREIIERAKREVDKSLEESKKVAEDAKRRIERLLREVER

SEQ ID NO: 15791 - protein, 60 aa, Artificial Sequence
  Synthetic
SEVEKVVREVEKLIREIERHSKEVNKRSKEDIDRIREKIERAIRRVEELIRKVKEVTERG

SEQ ID NO: 15792 - protein, 55 aa, Artificial Sequence
  Synthetic
EDLDRIRERLERLKKRTKELLERDEREVERVERELEELIRDIRRKIEKLKRDIEK

SEQ ID NO: 15793 - protein, 59 aa, Artificial Sequence
  Synthetic
SDLEDVIKKIEELLRRVEERLRDAVRKIEELLRASDERLREINEESRELLRRVKELKDA

SEQ ID NO: 15794 - protein, 56 aa, Artificial Sequence
  Synthetic
RKLVDDIRKEVERIVEEARKLLERIKREVKESSERAERLHEEDRKRVEDALREVKK

SEQ ID NO: 15795 - protein, 59 aa, Artificial Sequence
  Synthetic
KEAEDVLEKAKRLLKRSDEVVEEANDESRRLLDKIRKLVDTVNEESKRLLDRVRELREA

SEQ ID NO: 15796 - protein, 56 aa, Artificial Sequence
  Synthetic
KDAVRDVEREVRRSSKRLKELHEEDKRRVRKILERLKRLHEKDRRDLEKVMKEVED

SEQ ID NO: 15797 - protein, 60 aa, Artificial Sequence
  Synthetic
DDLDEVIKDIERLLKESDDDVERVIREIKKLLDEVRKRVRDANEDSKRLLREVERLAEAG

SEQ ID NO: 15798 - protein, 56 aa, Artificial Sequence
  Synthetic
ERLVREIERRVRKSSEDLRRRLEEIRERVEDIERELRKLHEEDKKRVEDILTEVRR

SEQ ID NO: 15799 - protein, 60 aa, Artificial Sequence
  Synthetic
SEKERVVEEVRKKLEEIRRRTEEMIERVERLLDEIRRRNKELVERNKELNKRIAEIVRDR

SEQ ID NO: 15800 - protein, 56 aa, Artificial Sequence
  Synthetic
SELARDIKRKLEKILEDSERLVDEIRKRIEKIKRESDETVRESRESSRRLLEEVKR

SEQ ID NO: 15801 - protein, 58 aa, Artificial Sequence
  Synthetic
SEVERLLEDNRRTIREDEERNKRVVDTWRELTRRLEERIEKVLTDNKKTVEDLVRKRG

SEQ ID NO: 15802 - protein, 56 aa, Artificial Sequence
  Synthetic
DDELRKDLERLDEESKRASEKLEEEVRREIKRSKELIEEVERKVEEIDKRADERLN

SEQ ID NO: 15803 - protein, 58 aa, Artificial Sequence
  Synthetic
SEVERVLEKLKRDVEKNERDNRRVLKKLREDVKKDADDNRKVLEDLRRAVEELRREVG

SEQ ID NO: 15804 - protein, 56 aa, Artificial Sequence
  Synthetic
TKDLVDEARKVLETSKRLSDELKKEVEKMLRESREMSKRLKEEVDRILKEVRDKAR

SEQ ID NO: 15805 - protein, 57 aa, Artificial Sequence
  Synthetic
DELEEVIDRNRKSLKEIEERNKKVIEDLRRAIKEIEDRLKEVLDRVKKRIEDIERRV

SEQ ID NO: 15806 - protein, 55 aa, Artificial Sequence
  Synthetic
EELRKKIEDVDRKVRKESEDLKRELKKLLDEIRRKVRELEERAKRVEEEVDREAK

SEQ ID NO: 15807 - protein, 57 aa, Artificial Sequence
  Synthetic
SELEEVIRDNERSLKEIEDKNREVTKTVREEIKRIAKKLKEVLDRNRETVRDIERRV

SEQ ID NO: 15808 - protein, 55 aa, Artificial Sequence
  Synthetic
DELRRRIKEVDKEVEEKSEKLKREVKAVLDRVEKLAEEIRKKVEDVDRTVEEKAR

SEQ ID NO: 15809 - protein, 59 aa, Artificial Sequence
  Synthetic
KEMEDLEREVERVLKRLEELVRELLETVRRTLTRLKRKLDEKKKELDKVNEDLDRVTRE

SEQ ID NO: 15810 - protein, 55 aa, Artificial Sequence
  Synthetic
ERVVKKLEDAIEEIKRKLEKVHDEHRRTVEKIEEDIRRVEEEHRRTIKEIKEKLK

SEQ ID NO: 15811 - protein, 59 aa, Artificial Sequence
  Synthetic
SESERLAKEVEKKLKDAERLVKELHEEVDRMNRDLERKLREISERAKKTTEDVERVAER

SEQ ID NO: 15812 - protein, 55 aa, Artificial Sequence
  Synthetic
EEVIKKVRKDIEEITRKLERSNREHERTLREIKKRAEKVHEDHRREIDRIREELK

SEQ ID NO: 15813 - protein, 59 aa, Artificial Sequence
  Synthetic
RESEELEREVERVLRELEELVKRLHDDVRRVDEELDRKVRDLHKKVRDVLRRVEKLVRD

SEQ ID NO: 15814 - protein, 55 aa, Artificial Sequence
  Synthetic
DRVVDRLRRKIEEIARRLRKSNEDHRRSLKEIKDKLEESNERLRRALEEIAERLR

SEQ ID NO: 15815 - protein, 60 aa, Artificial Sequence
  Synthetic
SEKDEVITRVETELRRVKTEDRDVARRVKEELEDLKRRLERVIEDNERTLRELKKELKER

SEQ ID NO: 15816 - protein, 55 aa, Artificial Sequence
  Synthetic
EDVVRELEKLLRDWEKRSREVEEKLRRLLDELRETLKEIEKELRRLDKEIKERLR

SEQ ID NO: 15817 - protein, 60 aa, Artificial Sequence
  Synthetic
DREEKVKRRVEEELDRVRRTDDRVLKRVEERLREDEKRNEEVIRRNEKTLRELEKRLRDN

SEQ ID NO: 15818 - protein, 55 aa, Artificial Sequence
  Synthetic
EDVVRELEELLKRWKETSERVKRELTDLLRKSEETSKEVTKTLRELDKRIEDELR

SEQ ID NO: 15819 - protein, 59 aa, Artificial Sequence
  Synthetic
SREEDLKRKIDEVDKEWKKLTKKLEEEIREVEKEWRKLSKELERKIREVEKRLKEAKDR

SEQ ID NO: 15820 - protein, 55 aa, Artificial Sequence
  Synthetic
EEVIKTLRERVKDIHREDKEIIDRLREKAERIKEHDRKLLEDLKRTLDKLRREME

SEQ ID NO: 15821 - protein, 59 aa, Artificial Sequence
  Synthetic
DEREEIKKELDRIIRESEELVKKIKDVIRKLIEESKRLVEKIREDIKRSNDKLDEVTRR

SEQ ID NO: 15822 - protein, 55 aa, Artificial Sequence
  Synthetic
EEVKRRAEDLLRRSDEKSKRIAEEAERRLDRSDEESEKILRDNEDMVRKWREKEK

SEQ ID NO: 15823 - protein, 59 aa, Artificial Sequence
  Synthetic
DETEKITKDLEDLIREDEKLVKDARDTLAKSNEDSRRLVEDLRRLIKESNEELERVVRE

SEQ ID NO: 15824 - protein, 55 aa, Artificial Sequence
  Synthetic
EDVVRRLERLSEESRERLERILRDNKRRLDKSLEDSKRLVEKNDRDLKKWKEDRR

SEQ ID NO: 15825 - protein, 59 aa, Artificial Sequence
  Synthetic
DERETVREELKELIERLRDLNRKIEELLRRSNEEIRRLVEEIRRRLKEMNDEIRRVLKK

SEQ ID NO: 15826 - protein, 55 aa, Artificial Sequence
  Synthetic
DKVLKEAKELLDASEKHLRDLIETNERVLKRWEEELDKIAEENERVLRKWEEEAK

SEQ ID NO: 15827 - protein, 61 aa, Artificial Sequence
  Synthetic
SEREEVLKKIREMSKRDNEKNKRILDDVRRLSKEDNKDNDRLVEEHRRKITELEDRVRKEG

SEQ ID NO: 15828 - protein, 55 aa, Artificial Sequence
  Synthetic
EVLREVEELSRRDEKRSKEILEEVSKLSKDDEDRSRDLLRKAEEENRRLEEKLRK

SEQ ID NO: 15829 - protein, 61 aa, Artificial Sequence
  Synthetic
SEKETVLEDIRRMSKEDNEKNERIVERARRILEKIEEKNRRVKEEAKKMLERIKKLVKDRG

SEQ ID NO: 15830 - protein, 55 aa, Artificial Sequence
  Synthetic
RVVDEVRKRSEEDERRSRELLEEVRRAVKRVEDKSRTTVREIRERVKEVKKRLDD

SEQ ID NO: 15831 - protein, 60 aa, Artificial Sequence
  Synthetic
SEVEDVVRKVRKLVEKSTRDNKRVLEKVRKLVKESSDKNKKVLDEVEELIERLREKLERI

SEQ ID NO: 15832 - protein, 56 aa, Artificial Sequence
  Synthetic
RDALEEIRKRVEDNKRRSDESLEEIRRLVEENKRRSEKTLKEIREKAKRLKDEIDR

SEQ ID NO: 15833 - protein, 60 aa, Artificial Sequence
  Synthetic
SEVEKVEREVDEMVRDSTKENEDILREVRERLKKIKEDLDRTVTEVRRLLKELEEKAREV

SEQ ID NO: 15834 - protein, 56 aa, Artificial Sequence
  Synthetic
KDMLDRVREKVKRNKEESDKSLDEIRRIAEEVKRRIDELLKEIKKRAEELKRKLRK

SEQ ID NO: 15835 - protein, 60 aa, Artificial Sequence
  Synthetic
SEVEEVLKRARELVERSTRENRKILERARKMLEDARKTNEDVLRDVERLLDELRRELEKI

SEQ ID NO: 15836 - protein, 56 aa, Artificial Sequence
  Synthetic
KEVLDEIRELVKENKKRSDDSLREAEKRLRELKEESDKTLDEIRRKLEKLKEEIDR

SEQ ID NO: 15837 - protein, 60 aa, Artificial Sequence
  Synthetic
DEVETVRKDVERLVRTSNDENRRILETARKLIKEVREKNKEVTDRVRDLLRRIEEEVKKV

SEQ ID NO: 15838 - protein, 56 aa, Artificial Sequence
  Synthetic
ERILEEIRRRVEENKKRSDESLKEARELLRDVERESDETLKEIEEEARRLKEEIDR

SEQ ID NO: 15839 - protein, 59 aa, Artificial Sequence
  Synthetic
DEVKKVVDEARKLVEDDKRTNEEVLRRTRELLERDERKNEEAVKRIRDLLKEIKKLVEA

SEQ ID NO: 15840 - protein, 56 aa, Artificial Sequence
  Synthetic
EELLKRIDELIKESKRRTKEAHRESEELARKTKKSTRDLLREVEKRLREIKEEIKR

SEQ ID NO: 15841 - protein, 59 aa, Artificial Sequence
  Synthetic
SDVEKVVDEVREKVKRDKEDNRRVAKEARELVKESSEKLERLVTEVKKLIKTIEKLVRD

SEQ ID NO: 15842 - protein, 56 aa, Artificial Sequence
  Synthetic
DELLKEIDKLIKESKKETDDLLKEIKDLIDENKRRIDKLLREIEKLARKVKRDIEK

SEQ ID NO: 15843 - protein, 59 aa, Artificial Sequence
  Synthetic
SDVEKVVEELRRLVRKDEEDNRRAVEETRRLVEDSSRKLEEMVRRVRDLIRKVEELVKS

SEQ ID NO: 15844 - protein, 56 aa, Artificial Sequence
  Synthetic
ERLLREIEKLIRESKKKTDDLHRESKKLIEDNKKRIDDLLKEIKDRVERVKEEIRR

SEQ ID NO: 15845 - protein, 59 aa, Artificial Sequence
  Synthetic
DEVKKVVDEVRKKVEEDKDDNRRAVKETRELVEESSRDLKRLVETSRRLIEEVERLVEK

SEQ ID NO: 15846 - protein, 56 aa, Artificial Sequence
  Synthetic
ERLLREIRKLITESKKTTRDLHRDSKRLIDENRKRIRDLHEETRKLVKEVLDKIRK

SEQ ID NO: 15847 - protein, 59 aa, Artificial Sequence
  Synthetic
SDVEKAVDEVRKLVKDSNEKVERVLREVRKLIEEDERKNREVFERVRKLIEDILRLVKG

SEQ ID NO: 15848 - protein, 56 aa, Artificial Sequence
  Synthetic
EKLLRDIREEIERNRRELEKALREIKKEIEKTKRKTDRLLETIKELIDRVVEEIKR

SEQ ID NO: 15849 - protein, 59 aa, Artificial Sequence
  Synthetic
DEVETVKRRVEELVKRSNEELKRIVEETRRRVEDDERDNERIIREIKKKLKDIEELVKS

SEQ ID NO: 15850 - protein, 56 aa, Artificial Sequence
  Synthetic
EEILKTIRRLIEKNREDIDRLHEESKREIDRTKERTDRLLDDVRRIAERIKEEIDK

SEQ ID NO: 15851 - protein, 59 aa, Artificial Sequence
  Synthetic
REVEEVLKEVDELVRKSNEDLKDIVRRTRDLLRKDKERNDEVVRRSEELIRRVEELVRR

SEQ ID NO: 15852 - protein, 56 aa, Artificial Sequence
  Synthetic
EEALERIKRKIDENEKEIRELHKESEKRIRDTLRATDKLHKDTRRRVEEVKEEIKK

SEQ ID NO: 15853 - protein, 59 aa, Artificial Sequence
  Synthetic
SDVERVVERARDLVRKSDDDLRKMVAETKRLVEESSKKLDKIVRESRELIRDVKRLVEE

SEQ ID NO: 15854 - protein, 56 aa, Artificial Sequence
  Synthetic
EELLKEIKKRIDESREKTKRLHEESRKLIEDNKRRIDELHKETKEEVERAKKEIED

SEQ ID NO: 15855 - protein, 60 aa, Artificial Sequence
  Synthetic
EEVKRALEELDELVKRIEEDSRRMVKEAEDLVEKIRKEIEDLLRRSRKLNEDIRRLIDRD

SEQ ID NO: 15856 - protein, 56 aa, Artificial Sequence
  Synthetic
EDILRRADELLKRLRRKDEELTKKIERLLEKVAKEVEDINRESKRSADEVRKRVRK

SEQ ID NO: 15857 - protein, 60 aa, Artificial Sequence
  Synthetic
SSVKEVRDELKRLVDEIRKESEDMVERLRRLVEEIRKRNEELVRRSEELNERARRLIERD

SEQ ID NO: 15858 - protein, 56 aa, Artificial Sequence
  Synthetic
DKILKEAEDLLRDLERRDRELTREVEKLLEELRRTSEETNKRSKESADRVEDEVRR

SEQ ID NO: 15859 - protein, 60 aa, Artificial Sequence
  Synthetic
KEVEEALKRVRELVKRAEDMNEELLRRSRKLNDEIRRRIEEMLRRLEEVVRRIKELVDRD

SEQ ID NO: 15860 - protein, 56 aa, Artificial Sequence
  Synthetic
EKILTEIEKRLKDLEKKSRDSNRESEESLERIRRKVEEIARRVRELLDRLRREVER

SEQ ID NO: 15861 - protein, 57 aa, Artificial Sequence
  Synthetic
SRLEEVTRRARKLVEDITRELRKAVEDSRRVVDKIRRLNEELTRRSRELVKEVKDKV

SEQ ID NO: 15862 - protein, 59 aa, Artificial Sequence
  Synthetic
EKVREILEEIRRLLEELEREVKELNEESKRRLDELEKRSEETNKESEDLLEKVRRDVEK

SEQ ID NO: 15863 - protein, 57 aa, Artificial Sequence
  Synthetic
SELEDVVRRLDELVKRIKEENRETLERSRRLVEEAKRTNEETEDRMRRLVEEIEKKV

SEQ ID NO: 15864 - protein, 59 aa, Artificial Sequence
  Synthetic
EEVRRLLEEIRRKLEDAKRHVEELSEESKKLLKELEEHVREVNKKSEKLLRELKDKVKT

SEQ ID NO: 15865 - protein, 57 aa, Artificial Sequence
  Synthetic
SELEKLVEDVRRLVEKIKRDNRKTLKELEELVREIVERNRDTLRRSRELVDRIKKRV

SEQ ID NO: 15866 - protein, 59 aa, Artificial Sequence
  Synthetic
EDVRRVLKEIKELLERVREHVERLNRDSERLLKDLEEHARRLSKESKELLRELEERVRT

SEQ ID NO: 15867 - protein, 60 aa, Artificial Sequence
  Synthetic
SEVEKIREDVKKLIEESKKLNRDILEEVRKMIERWRDTTRRIRERIRKLIEEAEEEIKRS

SEQ ID NO: 15868 - protein, 56 aa, Artificial Sequence
  Synthetic
SEVLEEVKRLVEESKRESDEILKRVKKLVDDLARTDDKVLEDIKREVDRLKKELED

SEQ ID NO: 15869 - protein, 60 aa, Artificial Sequence
  Synthetic
SEVEKIKKDVDRMITEWEKRSRDIAKTVDELIEDSRRLNETIRRDVDRVARELKERIKRT

SEQ ID NO: 15870 - protein, 56 aa, Artificial Sequence
  Synthetic
DDVLKKIEEALKRLADRDDDILRRIETLVRKTRRESEELLKEVEDKMRKLKEELRR

SEQ ID NO: 15871 - protein, 60 aa, Artificial Sequence
  Synthetic
SEVEKLTEDVKRLIEKSKRNNRDILRKVKEDIDEWRKRTKKIADEVRKTERDLEEKIKRT

SEQ ID NO: 15872 - protein, 56 aa, Artificial Sequence
  Synthetic
DEVLRRIEEDLKRSKKETDDILKEVKDLLTDLLRRDDEVLEEIKRRAERIKEEIDR

SEQ ID NO: 15873 - protein, 60 aa, Artificial Sequence
  Synthetic
REVEKILTDVRRLIEEWRKKTEDIKREVDKLIEEWRKRSDEIADRSRKLAEEIERLLREG

SEQ ID NO: 15874 - protein, 56 aa, Artificial Sequence
  Synthetic
ERVLRKIRRDLERLKKTDDDVLKTIEKKLRELEERDRRLHKESREIAEKLKEDIDR

SEQ ID NO: 15875 - protein, 60 aa, Artificial Sequence
  Synthetic
DEVETIMEKVERDVKRWEELTREIKRRSDKLIEDWKKRSEEVLRESTELIKTIEKLLREG

SEQ ID NO: 15876 - protein, 56 aa, Artificial Sequence
  Synthetic
ESVLRTIDELVRRLEEEDRKVHEESKELARRLEKEDKRLHEESKKLIDELEKKIRD

SEQ ID NO: 15877 - protein, 59 aa, Artificial Sequence
  Synthetic
SEVEKILDEVRKLVKKWDDETRKILEEIDKLIEDSERLLEKIERRSKKLADEIRDLLRK

SEQ ID NO: 15878 - protein, 56 aa, Artificial Sequence
  Synthetic
KSVLDEIRERVTRAKEKDKRVLERVKREVERTKEESKRVHEKSREIIERLKKEIDK

SEQ ID NO: 15879 - protein, 57 aa, Artificial Sequence
  Synthetic
DEVRKVRKELDDAVRKLRRDHERVIRESEKVSKEIEDRARDVERRLDKVVDELRKKD

SEQ ID NO: 15880 - protein, 55 aa, Artificial Sequence
  Synthetic
EEVMKRLRDMIRRLKEDAEKLKRELKRRHERVKELLDKVRRELEKLEKEVDDKVK

SEQ ID NO: 15881 - protein, 57 aa, Artificial Sequence
  Synthetic
DEVREVERESEELSEELRRRHEEVVKESEEVSKEIEERIREVIRDLRRVLRKLEEDG

SEQ ID NO: 15882 - protein, 55 aa, Artificial Sequence
  Synthetic
EEVVKELRELHDRSRKKVEDIAREARDMHRKAADKLRRLMEDLKRVLEEIRKKVE

SEQ ID NO: 15883 - protein, 56 aa, Artificial Sequence
  Synthetic
SRVDKIRRELRELLERDREDLERAMRELRKIDKDIDERLKEVVERLRRIDERIDRE

SEQ ID NO: 15884 - protein, 55 aa, Artificial Sequence
  Synthetic
KEVEKEVEDAIRETEKRAREVEEENRKSVEDVRRKMKKVEEENRKSVEDVRRKAT

SEQ ID NO: 15885 - protein, 56 aa, Artificial Sequence
  Synthetic
SRVDKIRKELEDLLREDEKRIRDMVKRLREIDEKIDRELEKVARELRELLKRVEDS

SEQ ID NO: 15886 - protein, 55 aa, Artificial Sequence
  Synthetic
EEVEKKVRELVERTEETVRDVERENKESVKRVREKAETVKREVEKRAKEVRDKAK

SEQ ID NO: 15887 - protein, 60 aa, Artificial Sequence
  Synthetic
SEMEEVEERLKELDDKDKRDVDEARKRLEKLDRDIDRRIKEVTKRLRDLNRRIEEELRRN

SEQ ID NO: 15888 - protein, 55 aa, Artificial Sequence
  Synthetic
EEVEKKNRKSADDSRETAKRVEEENERTIKRLEEELREVEEEDRKTVEDLRRTLK

SEQ ID NO: 15889 - protein, 60 aa, Artificial Sequence
  Synthetic
DEVREVTKELRDLDREDKKRVEEATKRLRDLNEEDKRLVKKVADDLREDLKRIRERLERN

SEQ ID NO: 15890 - protein, 55 aa, Artificial Sequence
  Synthetic
EEVEKENERSVKKSEEDLKRVKDEDEESVKESRKAVREVEEELRKRLKELREELK

SEQ ID NO: 15891 - protein, 57 aa, Artificial Sequence
  Synthetic
SEDETVRREVRELIRRLRKHSEDVKRESDKLLDEIRRRVKEVEDRVKEAVERLDRKK

SEQ ID NO: 15892 - protein, 55 aa, Artificial Sequence
  Synthetic
EDVVRKIRTVVKKIEEDNKKTADELRKLHKDIKKEVDDMEKRIRKVLDEIDKEIK

SEQ ID NO: 15893 - protein, 57 aa, Artificial Sequence
  Synthetic
DEEERARRELEDLLRRLREHSERVAKEVEEVVERNRRKSEEVEKRVREMLKRLDEKK

SEQ ID NO: 15894 - protein, 55 aa, Artificial Sequence
  Synthetic
KDVVKEIRDRVREAERRNREVVEEIRKLLKEIDKTTRDVEEEIRKLLKRIDEEIN

SEQ ID NO: 15895 - protein, 57 aa, Artificial Sequence
  Synthetic
DEERKARTEVKKEVDDLKKHVKDVADEVREAVKKNRRKSEEVSREVRDLIRRLKETK

SEQ ID NO: 15896 - protein, 55 aa, Artificial Sequence
  Synthetic
EDVVREIRELLKRIREENRRTVEEIRKLLKRIDEATEELVREIRRVVKEIEDKIR

SEQ ID NO: 15897 - protein, 57 aa, Artificial Sequence
  Synthetic
DREEKLRKELKKLIDDDRKKSEDVEREVRKLIKENEDKSRKVEEEVRKLAEELDTKK

SEQ ID NO: 15898 - protein, 55 aa, Artificial Sequence
  Synthetic
EEVIKEIRTVVKRVNEESEEMTKRIRDVVREADKTTEDVRRKIEDMVRRIDERTN

SEQ ID NO: 15899 - protein, 60 aa, Artificial Sequence
  Synthetic
DELRRIEEEVRRRFEEMARRHRKVKRDIEELVKEVTKRNKDTEREIEELVKRMKDEIDRI

SEQ ID NO: 15900 - protein, 59 aa, Artificial Sequence
  Synthetic
EEKVRRVVKKAREAVERSSREVEKVEREVKKLLDDLKKHSEEVEKKVRELLKRLEDRAR

SEQ ID NO: 15901 - protein, 60 aa, Artificial Sequence
  Synthetic
SELEEIVKTAREIMDRVRREHDRVATEIRELVKRLEEANRRVREEIKRLVKEVEERIRKI

SEQ ID NO: 15902 - protein, 59 aa, Artificial Sequence
  Synthetic
REEVEKVVKEIEDVVRESSERVRRVVEEVKKLLRELAKHSEDVEREVRELLKKLAREVD

SEQ ID NO: 15903 - protein, 58 aa, Artificial Sequence
  Synthetic
DELKEIRDRIKKRVEELRRENEEVREEIERIVRKAREDHRRVERELEDLVRRARDKVE

SEQ ID NO: 15904 - protein, 59 aa, Artificial Sequence
  Synthetic
EEEVRRVVKEVEELLEDLKRHSEKVKEEVKRLLEESSREVERVEEKAREMLERLRERAR

SEQ ID NO: 15905 - protein, 60 aa, Artificial Sequence
  Synthetic
SEAEKLRDEIRRIVEKAERDHEDVKKKIEDLVKRVEERNREVTKRIRDLVRDARRRLDEI

SEQ ID NO: 15906 - protein, 59 aa, Artificial Sequence
  Synthetic
KDKLKKVEEEVEELLKKSNRKVREVKRELKELLDRLAKHSDEVRREVEELLRDLARRAT

SEQ ID NO: 15907 - protein, 60 aa, Artificial Sequence
  Synthetic
SELEKIREDMRELVERLKEANDRMREKIRKILEDVDREHEEVRKRIEELVKRARETIERI

SEQ ID NO: 15908 - protein, 59 aa, Artificial Sequence
  Synthetic
KDKVKKVKEDVKRLLDELRKHSEKVIREVEKLLRESNEKVKRVKEKLEELLRRLRERSR

SEQ ID NO: 15909 - protein, 56 aa, Artificial Sequence
  Synthetic
DEIETIKKEIDDMLREIKREVERSKEEIDRALKRIREEVKKSEEEIDKALEELRRN

SEQ ID NO: 15910 - protein, 59 aa, Artificial Sequence
  Synthetic
EEIIKRLLEKIRREARKVKELIRTSNEEVRKRLKDLEELIRKSHEDVRRTLETLERETR

SEQ ID NO: 15911 - protein, 60 aa, Artificial Sequence
  Synthetic
DKERELDKEVRDMIDTLRDSNRRINERSERVLRELDESVKKNEEDIRRAIEELKAEVRRD

SEQ ID NO: 15912 - protein, 55 aa, Artificial Sequence
  Synthetic
EKVLKEIRDLARKIKEDNDRSLEDNDRLAKEIKERNKRVHDETRKMLEDIKRELT

SEQ ID NO: 15913 - protein, 57 aa, Artificial Sequence
  Synthetic
DEDKEIDERVKTVKEEIRRRSKKDKEEVDRVLKESDETLKRILEEVKKVLKEIEERV

SEQ ID NO: 15914 - protein, 59 aa, Artificial Sequence
  Synthetic
EEELRRIVERVRERVTELREKLKEIHKRTREVADELRKNNRRWEEDVRRLVKELREREE

SEQ ID NO: 15915 - protein, 57 aa, Artificial Sequence
  Synthetic
DEEERIRTKVEKVKRELEEKSERDKRALEKVEDESRRTSEEDERELERVIEEIIREV

SEQ ID NO: 15916 - protein, 59 aa, Artificial Sequence
  Synthetic
EEELRRIEREVDRAVKELDRLLRELHRRTREVVKELRDLDRRIHEDTRRVVREAREEVR

SEQ ID NO: 15917 - protein, 57 aa, Artificial Sequence
  Synthetic
SEREEIEERVERVERESEDTSRRDEEALERVLRESEDTSRKDREALRKALEDIEREL

SEQ ID NO: 15918 - protein, 59 aa, Artificial Sequence
  Synthetic
EDVLRRIMEDVKRVADKLRELDKKIHEETRRAVDDLRRLDKEIHDRTRKLVKELREEAK

SEQ ID NO: 15919 - protein, 59 aa, Artificial Sequence
  Synthetic
SEIEEITKDLRRLVEEIERLNKRVEDENERTAKELRDRVREAEKKNRKTVDDIRKLIED

SEQ ID NO: 15920 - protein, 55 aa, Artificial Sequence
  Synthetic
DEVRREVDELIKKSRETLKRIERRSEEVAEELERRLRDIKRRSEDMVRELEERAK

SEQ ID NO: 15921 - protein, 59 aa, Artificial Sequence
  Synthetic
DEKEKVTKKIEELLKAIEDKIREVEKRSRDSAKEIEDRNREVEKRNKDTVRRIRELIER

SEQ ID NO: 15922 - protein, 55 aa, Artificial Sequence
  Synthetic
EEVRKRLEDAVERIKKELKRIKDENDEVVKKSRDSLRRIKEDSERVVRELEERAK

SEQ ID NO: 15923 - protein, 59 aa, Artificial Sequence
  Synthetic
KRKEDIERRIEKLVRDDRRLVREAEKRSKESVDRLRDLVDKARKESDESARTIDKLIKD

SEQ ID NO: 15924 - protein, 55 aa, Artificial Sequence
  Synthetic
ERVRKRLEDVVRESKKRLDEIKKRNEDVVRELEERLRRIEERNRRVAEELKRKAK

SEQ ID NO: 15925 - protein, 56 aa, Artificial Sequence
  Synthetic
SEIEDIERELRESNKRHEDTLRKIKRDLEDSNRRHRETIRDIEARLEEVIKKLRED

SEQ ID NO: 15926 - protein, 56 aa, Artificial Sequence
  Synthetic
EEELRELVKRVHERAERVNRDLKRKVKEVHDRVREVNKELRRKVEELKRRAEERRR

SEQ ID NO: 15927 - protein, 56 aa, Artificial Sequence
  Synthetic
SEIEDIKRKLDDVIREHARTLKEIKDELKKSNERARERIEDIDRKLRDVERRLRES

SEQ ID NO: 15928 - protein, 56 aa, Artificial Sequence
  Synthetic
VEELEDLVRRLKKRVEEVNKRLREKVKRLHDEVDRVLRELEEEVKKLKEDVERAAK

SEQ ID NO: 15929 - protein, 56 aa, Artificial Sequence
  Synthetic
SEREKIEEDIKKALKEAREVVERIKKKLDDSNREHKRTLDEIKKKLDEVIDEVRKS

SEQ ID NO: 15930 - protein, 56 aa, Artificial Sequence
  Synthetic
EEEIREDLERIVTEVKKVLDELDKLVKDLHDEVRKVNEELDRKVKKLRKEAEEKTR

SEQ ID NO: 15931 - protein, 56 aa, Artificial Sequence
  Synthetic
SEIEEIKRRLEDSNRRAREVIKRIEDELRRSNEEHRRTLKEIKEELDRVLEELKRK

SEQ ID NO: 15932 - protein, 56 aa, Artificial Sequence
  Synthetic
EDELREVVKRVHDEVRRELKKLEELVKKVHEDAKRVNEELRRKVKEVKERAERDVR

SEQ ID NO: 15933 - protein, 59 aa, Artificial Sequence
  Synthetic
RREEEVEKRLDDARRRLEKSNRDDERLTRTVEEELKRSNDEIRKRLETAMRELKKLVKD

SEQ ID NO: 15934 - protein, 55 aa, Artificial Sequence
  Synthetic
EEVERRLEKVEEDSRRELKRSEKRSDEVARDSERLLDEWRRRLEEVIRRVKEETR

SEQ ID NO: 15935 - protein, 59 aa, Artificial Sequence
  Synthetic
SREETVRERLREVAERLKKSNREIEELLKKAAEELKESNTRDKKLSEDVSRRLEKLSRD

SEQ ID NO: 15936 - protein, 55 aa, Artificial Sequence
  Synthetic
EEVEERLKRVIEESERRLDKWRRDLDRVIKESEDLLKKSREDSERVVREVEKKEK

SEQ ID NO: 15937 - protein, 60 aa, Artificial Sequence
  Synthetic
SEIEEVERMLEDLERRVREADKRVREESKKLEDEIRREDKRVEEMIDEVRKKVDELDRDV

SEQ ID NO: 15938 - protein, 59 aa, Artificial Sequence
  Synthetic
KDEVRRIEEEVDRVIEENRETVKEIEERNRRVLEANRESLRELEERLKRILEEVRRRSK

SEQ ID NO: 15939 - protein, 60 aa, Artificial Sequence
  Synthetic
SEIDEVRREVEELERRAEEVDREVERRSKELKERVDDVDRRSRELSKRLKDTADEVRKRV

SEQ ID NO: 15940 - protein, 59 aa, Artificial Sequence
  Synthetic
KDKLETIRRRLEEVLKRNKETVDEIRRRNEDVIRRNEESLEKNERDLRRVLDEVRRSAT

SEQ ID NO: 15941 - protein, 60 aa, Artificial Sequence
  Synthetic
SELEKVDELVKRLMKEVRDVDRRSEKLTEELERKVREMDRKSKKLSEDLERDARRVEKEV

SEQ ID NO: 15942 - protein, 59 aa, Artificial Sequence
  Synthetic
KDALRAIEKKLEDILRRNEETLRRNEDKIRRIIETNKRSLEENRRRLEEVLRRVKESAR

SEQ ID NO: 15943 - protein, 60 aa, Artificial Sequence
  Synthetic
SITEKVERLIRELERKVKEIDDDLRRTSEEIMKRARKADEDSERLSERLRELVDRLDREV

SEQ ID NO: 15944 - protein, 59 aa, Artificial Sequence
  Synthetic
RESAERLKEELRRVLEENRETLERLREENERVLEENKRRVDENREKIKEVLRRVEERTR

SEQ ID NO: 15945 - protein, 60 aa, Artificial Sequence
  Synthetic
SITERVEEDIKRLMEEAKRVDDKVRKLVEELMRDVKRVDKELAELVEELERRVKDLTRRV

SEQ ID NO: 15946 - protein, 59 aa, Artificial Sequence
  Synthetic
REEAERLKEELRRVLEENRRTVEEIERRIKRVLEENEETVRRLEKRIEEVLRDVREKTK

SEQ ID NO: 15947 - protein, 57 aa, Artificial Sequence
  Synthetic
SKVEELKRRLKKVRDDDRRSVEKLRETLRRVLARDRDEIREAERELREALKRLEDAG

SEQ ID NO: 15948 - protein, 55 aa, Artificial Sequence
  Synthetic
EDVLRDVERVVREVLEKNKKILKEVKEVVEESLRNVRDLIRRAREIVKEIVDRVK

SEQ ID NO: 15949 - protein, 57 aa, Artificial Sequence
  Synthetic
KEVEDLRRELEEAKKRDKDLIDKLKRRAEEVKEEDERSIRENKKALRKAEEDLRRKG

SEQ ID NO: 15950 - protein, 55 aa, Artificial Sequence
  Synthetic
ERVLEEVRKTLKRSMENVEELEKELEELVTRVRDHNRRDHEETRRLLEEIKRRVD

SEQ ID NO: 15951 - protein, 57 aa, Artificial Sequence
  Synthetic
DEVERLKEKLEEVRRRDEEIIRKLEEDLERVKRDDDRLVRENEEELKRVEEKLERDG

SEQ ID NO: 15952 - protein, 55 aa, Artificial Sequence
  Synthetic
EEVLRRVEEAAKRSLDNVDKLEKDVADLVRRSMENVRDLHRRTRRLLEELKEKVK

SEQ ID NO: 15953 - protein, 60 aa, Artificial Sequence
  Synthetic
SEKEKVLEDAERVLREIKKKNEKALREAEEVARRIAEEVKRIHDRSKEVVDDIKRLADAG

SEQ ID NO: 15954 - protein, 55 aa, Artificial Sequence
  Synthetic
KDVERRVREAKKENDKSVDEIREEVKRVKDELDRLSERNEEELEKVERDLRRRAK

SEQ ID NO: 15955 - protein, 56 aa, Artificial Sequence
  Synthetic
DEEKKVLDKLRELATRLSRRVEEAHRESEKIAEEIRRRAEKVLRESRKTVEEIKRS

SEQ ID NO: 15956 - protein, 55 aa, Artificial Sequence
  Synthetic
ERIKDDVRRMKKELEDLIEENRRRVEKVKEDIRRLIRELEARNEDVDRELRRKED

SEQ ID NO: 15957 - protein, 56 aa, Artificial Sequence
  Synthetic
SRLEKVEKELEELAREDKERIKRVIDDIRRLVREDEERIKEMHKKTEDIVRAIEEE

SEQ ID NO: 15958 - protein, 55 aa, Artificial Sequence
  Synthetic
ERIKKRVEKLKRDSKRLIDELRKELEEVVKRSEDLIKENRDTVKEVSDRIREKAR

SEQ ID NO: 15959 - protein, 56 aa, Artificial Sequence
  Synthetic
DDEERVLKELKKLVEDDRKKIEDVIETIERLAREDVERIKRVIEELRRLVKELEDG

SEQ ID NO: 15960 - protein, 55 aa, Artificial Sequence
  Synthetic
EEIKEDVKRAADESEKLIRELRKAVKRVEEESRRLIEELEREVKEAEERLKRRTK

SEQ ID NO: 15961 - protein, 60 aa, Artificial Sequence
  Synthetic
EEVERLLEELKELVRRIEERLKRAHDEMEDLVRRIKEEIKKLHEDTKRVVEEIRKLIERD

SEQ ID NO: 15962 - protein, 58 aa, Artificial Sequence
  Synthetic
ERVKEAEDRVRDAVRRLKRLLEEHKKASEKVVRELERLLEENRKTVKEVVDRLREESR

SEQ ID NO: 15963 - protein, 60 aa, Artificial Sequence
  Synthetic
REVEELIKELRRLAEEIRDRIRKLHKEMEDLARDIERRIEELDRELERVATEIAKLIERD

SEQ ID NO: 15964 - protein, 58 aa, Artificial Sequence
  Synthetic
EDIKRLEEEVRKVEEELKKLLKEHRDANKEVVDRLKRRIEEHKRKTKDLKEELERRMR

SEQ ID NO: 15965 - protein, 60 aa, Artificial Sequence
  Synthetic
DEVEEVIERLRRLAERIEERLREMDRRLEELVERAKRTIERLHEELEKLVREAEELIRRD

SEQ ID NO: 15966 - protein, 58 aa, Artificial Sequence
  Synthetic
KDVTRLEEELRRVVKKLEDLLREHKEKSDRAVEDLERLLTEHKKRNEDVIRRLKEASD

SEQ ID NO: 15967 - protein, 57 aa, Artificial Sequence
  Synthetic
SEVEEIRKKAEDVMRRLEELDKRLDEVLKKVSRELEKSDKDLEDRIREVIRELEERG

SEQ ID NO: 15968 - protein, 55 aa, Artificial Sequence
  Synthetic
DEMERRLEEVVKEAERRSEEVLRRLEKVVKDIKKKSKEILDRLEELVREIRERVR

SEQ ID NO: 15969 - protein, 56 aa, Artificial Sequence
  Synthetic
SESEEIDREAKKVEREVREMSRRNDEELRRVAKESEDSVRRVEDRVREVSEEVEAR

SEQ ID NO: 15970 - protein, 59 aa, Artificial Sequence
  Synthetic
EKELTEILKRLKDLADELRKLLEDVHRRSKKAADEDRKLNEDILKELEDLARELRKKTK

SEQ ID NO: 15971 - protein, 56 aa, Artificial Sequence
  Synthetic
DEEKKVRDEIRRAEEESRRSSKRNEDELRKVKEEIERRLEEVRRKAKEVEEKVRRE

SEQ ID NO: 15972 - protein, 59 aa, Artificial Sequence
  Synthetic
EEELRRILERLKEMVERDKETNEEIHRRSKDVVDKLRRRIEDIKRRLDELAEKLKEDTR

SEQ ID NO: 15973 - protein, 56 aa, Artificial Sequence
  Synthetic
DDERRIRETLKRADEEVEKALREVREHTKDVERENEKLSKENKERLEEVKKRVDDS

SEQ ID NO: 15974 - protein, 59 aa, Artificial Sequence
  Synthetic
KDVLRKIEKEIEEMVKDLRRLLKEVEDKDRTLAEELRRINEDIHRRSEEMKKELDDRTR

SEQ ID NO: 15975 - protein, 60 aa, Artificial Sequence
  Synthetic
KEVEDVEEKIREIVERIRDEARKAEERNRDTVRRIEDVARKLHKRTKEIVDEIRDVLTKR

SEQ ID NO: 15976 - protein, 59 aa, Artificial Sequence
  Synthetic
KEMLETIKRKVEKVKEDLRKKIEDIEKHTRDVEDKVRKELERNEKKSRDVKEEVERRLT

SEQ ID NO: 15977 - protein, 60 aa, Artificial Sequence
  Synthetic
SELEKAEKENKDSADEIREVLKRLEEENRETAKRIEKHTRDAHRKTEDIVRRIEEVLRRR

SEQ ID NO: 15978 - protein, 59 aa, Artificial Sequence
  Synthetic
KEALKRIRDHVEEVRREVEELLRKIREHTKEVAEKVRRENEKNKKRSEDVRKKVEDDER

SEQ ID NO: 15979 - protein, 60 aa, Artificial Sequence
  Synthetic
SEVERVLEENRKSAKEIEDELRKVLRENEKSAEDIEREIDKAEKENRETVKDLRRVLTER

SEQ ID NO: 15980 - protein, 59 aa, Artificial Sequence
  Synthetic
KEKLETIERHVRKVEEDVERMLKEIERRTRDVMRKVDKLIKEIEKHTREVAKEVKEAED

SEQ ID NO: 15981 - protein, 56 aa, Artificial Sequence
  Synthetic
SLVEDLERKLEESTRRDEESMKRVREILKELEDRDRKSVKEIEDELRKARKEVKDS

SEQ ID NO: 15982 - protein, 59 aa, Artificial Sequence
  Synthetic
EEMAREVIKTLEKVSRELEETNRRVIDRIRKLAEEILRKNKEVLERLRKIVKEIKEKAK

SEQ ID NO: 15983 - protein, 56 aa, Artificial Sequence
  Synthetic
SLVETLKKILDDSTRRNEELIRRLEEELKRIKETNERTVRELERELKRAEEEIERQ

SEQ ID NO: 15984 - protein, 59 aa, Artificial Sequence
  Synthetic
EEAAKRVIERLRRLSERNVRTLEEIIKTLRDLARRSKERDDEVLEELKEMIRRIEEKSK

SEQ ID NO: 15985 - protein, 57 aa, Artificial Sequence
  Synthetic
DELEKVVRELEELAKEILKKLDEIIRDTERLVREAVKRLRELIERTRRLMDEVRKKV

SEQ ID NO: 15986 - protein, 59 aa, Artificial Sequence
  Synthetic
EKVMRELEDTVRRVREELRKLLEEHNRRVKKVLEDLDRLLDEHRKIVEDIKRDLDRREK

SEQ ID NO: 15987 - protein, 57 aa, Artificial Sequence
  Synthetic
SEIEKVLEELRELVKKAVTDLRRIIEESKRLADEAAKALKDIIRRSEELADRLRKEI

SEQ ID NO: 15988 - protein, 59 aa, Artificial Sequence
  Synthetic
EKLARELEDVVRKVKETLDRLLEEHKEIIERIKRTLDKLLKEHNEIVERIKRDLDRRRK

SEQ ID NO: 15989 - protein, 57 aa, Artificial Sequence
  Synthetic
DEMEKVIRDDEKLLEDVLRRLAEIIRRTEKRAEEMVRELEKLIEDSKRKADDVRKRV

SEQ ID NO: 15990 - protein, 59 aa, Artificial Sequence
  Synthetic
EEVVKRLDDIARDVNRTLDKLLKDHNEIVERIERTLDELLKEHNEIVKRIKEDLDRKRK

SEQ ID NO: 15991 - protein, 57 aa, Artificial Sequence
  Synthetic
DDAETVIERDRKLADEVAKELKRLIEETRDLARRIREELRRLIEELKTLAKRAKDEV

SEQ ID NO: 15992 - protein, 59 aa, Artificial Sequence
  Synthetic
RDVVRELREIARKINEDLDDLLRKHNEIVEKIKRDLDRLLEEARKILEEIKRELDETKK

SEQ ID NO: 15993 - protein, 60 aa, Artificial Sequence
  Synthetic
DEEERLRDSVRRSRELIKEIRKRLEESIRRSERINERVREELRRSVRESERSAEEARRRG

SEQ ID NO: 15994 - protein, 56 aa, Artificial Sequence
  Synthetic
TETVLEEHKERVKRILDRARDLLRKHRELVEDSRRHLEKLLRDHRKVVKEIEDKIR

SEQ ID NO: 15995 - protein, 59 aa, Artificial Sequence
  Synthetic
SEEERLRESLERSRKRLEEVKRELERKLEEWEEIVEESRRRAEKSLRESKERIDDLKRR

SEQ ID NO: 15996 - protein, 56 aa, Artificial Sequence
  Synthetic
TEEVLRRHEKVVRRIDEELEELLEELERVIREDTERNKKLLDEHREVVKEIEERVR

SEQ ID NO: 15997 - protein, 60 aa, Artificial Sequence
  Synthetic
SSEKRLRDSVRESRDRARKIEEDHRRLVEEWERLVKRSEEEVRKSVEESREEVEKAKKEG

SEQ ID NO: 15998 - protein, 56 aa, Artificial Sequence
  Synthetic
TDKVLEDHKRLVEKILKEAEDNLRRSRKMIREDEERNRDLLRRHREVVKEVKRKVD

SEQ ID NO: 15999 - protein, 59 aa, Artificial Sequence
  Synthetic
DKEERLRESLEKSDRDIRRIKEELERLLREWEKRVRDSEKELRDVLRKVTEEAKELKKQ

SEQ ID NO: 16000 - protein, 56 aa, Artificial Sequence
  Synthetic
TDDLLRRHKEVVEKILREIEELLRELREAIRRDKKRNDELLKRLAEVAEKIREDVR

SEQ ID NO: 16001 - protein, 60 aa, Artificial Sequence
  Synthetic
SEKETLERSIRESERILEEVLRELKKVLDEWRRRVEESEKRHRDLIEEVRRRAKKLREDG

SEQ ID NO: 16002 - protein, 56 aa, Artificial Sequence
  Synthetic
TDDLLRRHKELVEEIKELLERLLRELEEVIKRDKDKNDENLTRSKRLIEEIEERVR

SEQ ID NO: 16003 - protein, 60 aa, Artificial Sequence
  Synthetic
DSEERLKESVKRSEDDLKRLRDEHRKLVEEWRRRIDESERRHRKLIEDVRRRLTEFRKRG

SEQ ID NO: 16004 - protein, 56 aa, Artificial Sequence
  Synthetic
TDRLVEEHKKMVKEIRDRVKANLERSRRMIKRDKEKNDDNLRRSKELIDKLEEDVR

SEQ ID NO: 16005 - protein, 59 aa, Artificial Sequence
  Synthetic
SKEERLRESSRRSEKAVREVEKRHKESVERSKEEIRRLAEELRKSIEDSERRIKEIRER

SEQ ID NO: 16006 - protein, 56 aa, Artificial Sequence
  Synthetic
TDRLLEEHRKLVERILEELEKNLERHRRVVKEILDRVKELLDEHRRRVEEIERKIE

SEQ ID NO: 16007 - protein, 59 aa, Artificial Sequence
  Synthetic
SKEETLKRSSEESKKELKRVDEELEKIIREWEEDVKRSEKELEEVIERAKREAEKLRTR

SEQ ID NO: 16008 - protein, 56 aa, Artificial Sequence
  Synthetic
TDTLLERHKRLVEEVREKLERLLRRLRKVIKEDRERNKRLIKRLKEVIDEIRERVR

SEQ ID NO: 16009 - protein, 59 aa, Artificial Sequence
  Synthetic
SERERLEDSSRKSKERLERIARTLEKLLRDWRREVEKSEKRHRELVEKVRRDLDDLRRR

SEQ ID NO: 16010 - protein, 56 aa, Artificial Sequence
  Synthetic
TEKLLRDHKRLVDDLDRRAKELLEELKRVIDEDKKRNEKNLTDSRRLVEELKEEVR

SEQ ID NO: 16011 - protein, 59 aa, Artificial Sequence
  Synthetic
SSKERLEESSERSERSIERIDREHERSSEESERRLKKMVDDLRRSSEKSKDDLEKLKRE

SEQ ID NO: 16012 - protein, 56 aa, Artificial Sequence
  Synthetic
TDELVERHKRVVEEIEERAERNLRRHKKVVEDILREARKVLEDHKELVERLKERVE

SEQ ID NO: 16013 - protein, 59 aa, Artificial Sequence
  Synthetic
DAERRLKKSSEDSKRAIDELRKEHEDSSRESKERLDKIKRDHEELVRRARERAEELRRR

SEQ ID NO: 16014 - protein, 56 aa, Artificial Sequence
  Synthetic
AEKLVTDHKRVVETILDKARKNLDRHRRAVEDLLRKARENLKKTEELVRKLDEDVR

SEQ ID NO: 16015 - protein, 59 aa, Artificial Sequence
  Synthetic
DAERRLREILRRVTERLKEVKERHKRSSEKSKKSADDVRREHEKLAEELRRKVEELKRR

SEQ ID NO: 16016 - protein, 56 aa, Artificial Sequence
  Synthetic
TDTVIEELKRRIRELEKRLEENLRRHEELVRRIEEELKRNLKRSRDLLKEIEDKVR

SEQ ID NO: 16017 - protein, 59 aa, Artificial Sequence
  Synthetic
SEAEEVLRRLEELAKRDREENKKVLDDLEKLVREDEERNKEVLKDLEKFIDELDKELRS

SEQ ID NO: 16018 - protein, 59 aa, Artificial Sequence
  Synthetic
KDVVRELERLLREWERDNERSREEIDRVIEEARKRNEDSERELDRLIKEVKDRLDEKAR

SEQ ID NO: 16019 - protein, 59 aa, Artificial Sequence
  Synthetic
SDAEDVLRKLKELIDRDTKENDEVLRKHKRLTDEDRRKNEEVVRELRKIITRLDEKLRA

SEQ ID NO: 16020 - protein, 59 aa, Artificial Sequence
  Synthetic
KEVLDRIRDLLRRWRERNEESRRRAEKSIRDSDETNKRSREEIKRIIRKLREILKERKR

SEQ ID NO: 16021 - protein, 59 aa, Artificial Sequence
  Synthetic
SDVEKVLRELEELIDRDRRDVEKVIEELRKLIKEDEEENREVLKRAEKMLREIREKLRN

SEQ ID NO: 16022 - protein, 59 aa, Artificial Sequence
  Synthetic
EKFLRDIRETLKRWKERNEELTRRLREIIREVEERNEESKRRLDELIREAEEDMRRRRT

SEQ ID NO: 16023 - protein, 59 aa, Artificial Sequence
  Synthetic
SEAERVLEDLKRLIDEDRKKLREILEDHKRLTDEDRERNRRVLEELDKIIKELDERLRS

SEQ ID NO: 16024 - protein, 59 aa, Artificial Sequence
  Synthetic
KDVLDKIEKSLRDWERDNERMVKEADRSVKRSDETNEKSREDLERLIEEARRRLKERER

SEQ ID NO: 16025 - protein, 59 aa, Artificial Sequence
  Synthetic
SEVERVLEELEELARRDEEKNKRVEDRLRKLIEDDRRDLRRILERLREIAERLKEEAES

SEQ ID NO: 16026 - protein, 59 aa, Artificial Sequence
  Synthetic
EEFVRRIRDLLRRWKEEVDRSEDRIRRELEKWERENEEAEKRIRKIIEDLRREIKKKAD

SEQ ID NO: 16027 - protein, 59 aa, Artificial Sequence
  Synthetic
SKLERVLEELERLIREDEDENKKILDRLKKLIDEDKKENDEIMETLKEIARKLTEELRS

SEQ ID NO: 16028 - protein, 59 aa, Artificial Sequence
  Synthetic
EEVLRRIRELIKEVRRRNDESRERIERLLKEWRERVDASERTIREIIKEIKERVRRARK

SEQ ID NO: 16029 - protein, 59 aa, Artificial Sequence
  Synthetic
SKAEDVLRKLKELIDRDRDENRKVLDELRRLIERDREKNRRIMEKLKKIVRELEEALKV

SEQ ID NO: 16030 - protein, 59 aa, Artificial Sequence
  Synthetic
EDVLKRIEDELERWKEEVERSKREIEKLIKEARDENDKSRKTIEKIIREAEKILRDRDR

SEQ ID NO: 16031 - protein, 59 aa, Artificial Sequence
  Synthetic
SEAERVLEELKELIERDEEENRRILEEHKRLTEEDLRENREVMKRLEDIIRELEEKLRT

SEQ ID NO: 16032 - protein, 59 aa, Artificial Sequence
  Synthetic
EKVLTDIERLIREAEKRNRDSKREAEKSVKKSDELNERSRRRIEKIIEELRRLVDTRRT

SEQ ID NO: 16033 - protein, 60 aa, Artificial Sequence
  Synthetic
SDVEKFLDELRELIRRSKERVDRMLRKLEELIRRSSEDVERLLKELKELIDDIRRLLDEN

SEQ ID NO: 16034 - protein, 59 aa, Artificial Sequence
  Synthetic
DELRERIKRLLEEHHKRLREAVEELRKLVEDATEEHERLSERAKRLVEEVKKRVDERER

SEQ ID NO: 16035 - protein, 60 aa, Artificial Sequence
  Synthetic
DEVEKVLRDLEELIRRSETDIRRLLEELKKLIDDTRREVKKVLDDLRRRIKEVLDRIRRN

SEQ ID NO: 16036 - protein, 59 aa, Artificial Sequence
  Synthetic
DEARERLKDTVTKASRRHEKVERDLEKLLEEHHRAIEKLRKELRDLVRKAKEDIDRARK

SEQ ID NO: 16037 - protein, 60 aa, Artificial Sequence
  Synthetic
DEAEKVRREHRELVEDSLRKAEEALKRLDELIKRTEKRVKDVEEELKRLIKRVLDEVRKN

SEQ ID NO: 16038 - protein, 59 aa, Artificial Sequence
  Synthetic
DEVKRRLRTSDKKVSEKHKELLDRLRELLRRHHESLKRLEERIRKLVTDATRRIEEEEK

SEQ ID NO: 16039 - protein, 60 aa, Artificial Sequence
  Synthetic
DEVEELLKEHRELVKESKKTVEKMLRELEELIKRTRDEVEKVERTHEELVRRVDEVLKRR

SEQ ID NO: 16040 - protein, 59 aa, Artificial Sequence
  Synthetic
DELKERLKESDKEASDLHEKAREDLERLLKKHHDDLRKIMERLERSDKEAKKRLEEEKT

SEQ ID NO: 16041 - protein, 60 aa, Artificial Sequence
  Synthetic
DEVEKLLKELEDLRRKTREDLERVKKELEELVKRSKDRLREAEDELRRLVEDIERVIRED

SEQ ID NO: 16042 - protein, 59 aa, Artificial Sequence
  Synthetic
DELKKRIRELVKEHTDELRKVKRELEALVEKATEDHERVLRRLEELVERIKREVDKAEK

SEQ ID NO: 16043 - protein, 60 aa, Artificial Sequence
  Synthetic
SDAEDLLREHRELVERSKREVERVLDELRRLIEKSLREVEKVLKELEKLIREILDRVRKN

SEQ ID NO: 16044 - protein, 59 aa, Artificial Sequence
  Synthetic
DRVREELRRSDEKVSRDHEELVKEAERLVDEATKEHRKLKRRIRELVRRAKEEIEKLRK

SEQ ID NO: 16045 - protein, 60 aa, Artificial Sequence
  Synthetic
SKVEDILRRHRELVKKSLDEIRDLLRKLKRLIEESLRRVEEVLRDHERLVREIEDRVRKN

SEQ ID NO: 16046 - protein, 59 aa, Artificial Sequence
  Synthetic
DELKRRLRESDKRVSERHKRATEEIKKLLDRATEEHKKLVKRLRDSDKRVADELDKAEK

SEQ ID NO: 16047 - protein, 60 aa, Artificial Sequence
  Synthetic
DDVDRVRKEHEKLVRDSLDTARKLLEELEDLIRRDKEDVERVLEELKRLIEEIDDRVRRN

SEQ ID NO: 16048 - protein, 59 aa, Artificial Sequence
  Synthetic
DELIERLRRSDKRASEEHKRLMDEAKRLVEKAEKDVTELNKDIKRLVKEVEDRLREAER

SEQ ID NO: 16049 - protein, 60 aa, Artificial Sequence
  Synthetic
DEVKKVLDESRELVDRIRRKAKEVDDRDRKLIRDVLEELKKLLEENRKLVEDIRRLLEAG

SEQ ID NO: 16050 - protein, 56 aa, Artificial Sequence
  Synthetic
KETLRRLHEETERILRDLKRHNDELNDEARKRLKEVKERLDESHDRVRRELEAKER

SEQ ID NO: 16051 - protein, 57 aa, Artificial Sequence
  Synthetic
KDVEEILRKLKELIDEARRRLEKTLRDHEDIVRRAKRRLEELLKRHRDIMDEVRRKV

SEQ ID NO: 16052 - protein, 59 aa, Artificial Sequence
  Synthetic
EEARRRLEEEVRKVRKEIEDVNRRLEKSHKEAEETLRRVEEELKKSHDELERILREIER

SEQ ID NO: 16053 - protein, 57 aa, Artificial Sequence
  Synthetic
DDVEEILRTLRELIKKIKKDLKKVLDDHERIARRAKEELERILRRHREIVERVDRKV

SEQ ID NO: 16054 - protein, 59 aa, Artificial Sequence
  Synthetic
DEARKKIEDIVREVEDDLRRVAKAAEDSNRKLEKDLREVAERLRKSHEEAEKALRDREK

SEQ ID NO: 16055 - protein, 57 aa, Artificial Sequence
  Synthetic
DDVRRLEEELRRLMEEAERRLRKTLEDHKRIVEEAKRRLEEILREHKRILEEIDKRV

SEQ ID NO: 16056 - protein, 59 aa, Artificial Sequence
  Synthetic
EELKKRVEDLVREIRRRLDKVNEDLERSNRELEKVLRDVLRELKKSHDDLERSLRETRR

SEQ ID NO: 16057 - protein, 57 aa, Artificial Sequence
  Synthetic
DEAEKILDELRRLIDEIRRRLRKTLEEHKRILERIRRELEKMLEEHRRIVDEMRRKL

SEQ ID NO: 16058 - protein, 59 aa, Artificial Sequence
  Synthetic
EEVTRRLEKLVRDVDRDIKRVNKELEKSNRELEKDLRAVEKRLEDSNRDARKKLEDTRR

SEQ ID NO: 16059 - protein, 57 aa, Artificial Sequence
  Synthetic
DDAERILEELKRLMEEVEKRLKDTLDTHREIARRILERARESLKRHEDIAREIERDV

SEQ ID NO: 16060 - protein, 59 aa, Artificial Sequence
  Synthetic
EDVKRKIRELVERAKKRLKEINDELKKSDEDLDRKLEDLNRRLEESNEELKRRLDETRR

SEQ ID NO: 16061 - protein, 57 aa, Artificial Sequence
  Synthetic
SDAEKLLEDIRKLTEDVERDLRRSLEELKDLIRRLKKEIEDLLERHKRIVDKVVREV

SEQ ID NO: 16062 - protein, 59 aa, Artificial Sequence
  Synthetic
EEVKERVERLVREVEKRLDEVDKELEEEVDKARKELEKLLEDIDRSDKEARKRLEDKRR

SEQ ID NO: 16063 - protein, 60 aa, Artificial Sequence
  Synthetic
SKEDEIRRLIEDLERRNKEVEETLRELVRETRERIERIKRRLEELIKKSKDEVDDARRKG

SEQ ID NO: 16064 - protein, 55 aa, Artificial Sequence
  Synthetic
EELLERLERLIDKSRKNVEDIVKRHEDLSRELTERAKAILERHKELTDELREDVR

SEQ ID NO: 16065 - protein, 59 aa, Artificial Sequence
  Synthetic
SEEERIERLIDELRRDNDEVRKRLDKLVKDTERENEEAERRLRRLIEESRREVEKLKAE

SEQ ID NO: 16066 - protein, 55 aa, Artificial Sequence
  Synthetic
EELARELEKLIEDSRRNVKRIKEEHEELSRRNRKLLEDILERHRRLTEELRKKVK

SEQ ID NO: 16067 - protein, 60 aa, Artificial Sequence
  Synthetic
SKEREIEELIKELEEEVERLKEELRRIIKKLRDDNKRAEEELERLIRESKEDLDRARKEG

SEQ ID NO: 16068 - protein, 55 aa, Artificial Sequence
  Synthetic
EELRKELEDVRRKLKEEIDRILEEAKRVVDDSRRNAEEITRRHKEATKRLREEVE

SEQ ID NO: 16069 - protein, 60 aa, Artificial Sequence
  Synthetic
SIAERLKELIDRMREDNERAAKELRELIRKAKEESKEVEERLRRRLKELRDRVEELVRRN

SEQ ID NO: 16070 - protein, 59 aa, Artificial Sequence
  Synthetic
KEMLDRILEELKKLIKESRENLRRILEDLKRLLDESRRHAERITRRLEELIKELKEKAD

SEQ ID NO: 16071 - protein, 60 aa, Artificial Sequence
  Synthetic
KARERLKRLIEEAKRRNEEMEKELDRRLDELRRESKTLEEDLRRSLEELEERIRRLVKRN

SEQ ID NO: 16072 - protein, 59 aa, Artificial Sequence
  Synthetic
REMVEEILRELRKLVEDSLEVLERILDDLRRLIEESRKHLEEVKRRLEELKKRLEDEAR

SEQ ID NO: 16073 - protein, 60 aa, Artificial Sequence
  Synthetic
KEVEKILEEIERLIREIDREVKRVKTENEKTVRDIRKRVEEIKEEHKDLTRKLEKLARDG

SEQ ID NO: 16074 - protein, 59 aa, Artificial Sequence
  Synthetic
DEARKRAEDLLRDAKRRVDEVVEELKKTVEELKEEVRKVEEELKELVKRSEDKVRETER

SEQ ID NO: 16075 - protein, 61 aa, Artificial Sequence
  Synthetic
SEVDKVLKEHEDLVREDKKRLEEILRELKDRLRRDEEELRRIMEELEELLRRLKDVVDKRR

SEQ ID NO: 16076 - protein, 59 aa, Artificial Sequence
  Synthetic
KEMIDRLRRSDEELKKEADRANEEAKRIVEKIRDTLKKANDKLDEIVERIEDELRRAET

SEQ ID NO: 16077 - protein, 60 aa, Artificial Sequence
  Synthetic
KEAEDVEEEHKRLVEDDRRKLEEIKKTLERLVEEDRRRLEEVVRELKRLLDEITDVLTKR

SEQ ID NO: 16078 - protein, 59 aa, Artificial Sequence
  Synthetic
DEVRKRLRKSDKELRDEAREVNKELEAIVKRARDEVKKVNDDLRKIVDEVRETVKEARR

SEQ ID NO: 16079 - protein, 60 aa, Artificial Sequence
  Synthetic
DEVREVKKRLRDLIRDDERELRRVLEELKELVKDDVDKLRRLIEKLRKLLEELRRVATKR

SEQ ID NO: 16080 - protein, 59 aa, Artificial Sequence
  Synthetic
EKAREELKRIVEEVEEKSRRANKKLKDIVDEMRERVKRANEELDDIVKKITEDLERMRK

SEQ ID NO: 16081 - protein, 60 aa, Artificial Sequence
  Synthetic
REVDEVRKEHERLVKEDEDKLRKIIEDLKKLLREDEKRLREALKRHRELVEEARDVVRKR

SEQ ID NO: 16082 - protein, 59 aa, Artificial Sequence
  Synthetic
DKVKKELEESDRRVEEKSRRANETLKRIVEEIRKKAEEINRRLKESDDRAAEDIKRVEK

SEQ ID NO: 16083 - protein, 60 aa, Artificial Sequence
  Synthetic
DEARRVKEELDKLRREDEELLRRLMEKLKDLIRRDTEELKRIIDELRELVERLEDELRRR

SEQ ID NO: 16084 - protein, 59 aa, Artificial Sequence
  Synthetic
EKVREELRRIVDRVKKEVDRANRELEDIRREVEEISKRANEELERIVTEAADRLRKVAE

SEQ ID NO: 16085 - protein, 60 aa, Artificial Sequence
  Synthetic
SEAEKVIREHERLLEEDRRRLEEALRTLERLAERDEERLKEAEERHRDLLRKLEETVKKR

SEQ ID NO: 16086 - protein, 59 aa, Artificial Sequence
  Synthetic
DEVKRRLRKSDEDVKRRAEEINKEAKEIVDDVKKKSDEANKRLKDSDKRVAERLKEAED

SEQ ID NO: 16087 - protein, 61 aa, Artificial Sequence
  Synthetic
SEVEKVIEDHDRLLKRDEELLRKIAEDLKDLVRRDEERLRRATEKLKRLLETLEDVLRKRR

SEQ ID NO: 16088 - protein, 59 aa, Artificial Sequence
  Synthetic
KEVKDKLRRSDERVEKRSRDANRELEEIVRRARKKSEEANRRLEEIVERAEKRLKEAED

SEQ ID NO: 16089 - protein, 59 aa, Artificial Sequence
  Synthetic
SEVDKVVEESKTSMRRLERRHREATKESKKSIEEIEETVERVKRESEKSVKKLDDLVKN

SEQ ID NO: 16090 - protein, 59 aa, Artificial Sequence
  Synthetic
EEVRRRLRKIHKELEERLRRMNKRLRELHRELEEKVKEVKKELEDIHRKARERVEKAKE

SEQ ID NO: 16091 - protein, 59 aa, Artificial Sequence
  Synthetic
EELKEVRERSKESIKRIKEEHERVEEELKDIKRDIDRRHKEVVDESRESVKRVEDLSRA

SEQ ID NO: 16092 - protein, 59 aa, Artificial Sequence
  Synthetic
EEVRRELREIHDELRKRVEEANKRLEDILREIDKRLKELNEELKRIHDRARERLEEERR

SEQ ID NO: 16093 - protein, 59 aa, Artificial Sequence
  Synthetic
DEIREVIKESKKSVEDVKRRHEEAKRESERSLKEIRELAEEVKERLRDLLRRIRKLVKD

SEQ ID NO: 16094 - protein, 59 aa, Artificial Sequence
  Synthetic
EEVRRRLRKIHKEAEERLRRANDELRKLHEEIKKTVEKIKRELDKIVEEIERDVRRDRK

SEQ ID NO: 16095 - protein, 59 aa, Artificial Sequence
  Synthetic
SRVEEILRDSKRSMDEARKEHERVLRELRDRLRRLDERHRRLLEELKRLLREVRELTRA

SEQ ID NO: 16096 - protein, 59 aa, Artificial Sequence
  Synthetic
EEVLRRLDDIHRRIKRELKEVNDRLEEIVREIRKRLKEVNERLKEIVDAVEEVVRRAEK

SEQ ID NO: 16097 - protein, 59 aa, Artificial Sequence
  Synthetic
KRLEDVARESKKSIDEIRKRHKEATDESNKSIEEARRIHEEVLRTLKELLDRVRKLIES

SEQ ID NO: 16098 - protein, 59 aa, Artificial Sequence
  Synthetic
EEVRRDLRRIHERLREEAEEVNERLERNHEELEREARKVNEELRKIVEDARREVERAKD

SEQ ID NO: 16099 - protein, 59 aa, Artificial Sequence
  Synthetic
DDVEEIKRRLEELLERLKEDHKRMLEESRKSVEDAEKIVEEVKKESEDSIREIKKLLKD

SEQ ID NO: 16100 - protein, 59 aa, Artificial Sequence
  Synthetic
EKVKRELDEIVKRIEDEARKVNEELKRIHDDAERKVRKVKEDLERIHRELKKRVEDDRT

SEQ ID NO: 16101 - protein, 59 aa, Artificial Sequence
  Synthetic
KEDERVEEELRKLLKELEDRHKKASEDSRDSIRRIRERARTVLEELKRVLEDIDRLIKA

SEQ ID NO: 16102 - protein, 59 aa, Artificial Sequence
  Synthetic
EEVKRRLDKIVDDVRERLKEMNDRLRRLHEELKRELERIKEELDKILEEVKRRLEEARR

SEQ ID NO: 16103 - protein, 57 aa, Artificial Sequence
  Synthetic
ELEERLTRSNDELRKELKRMNEELRRKLEEIRKELERLNEKLREIIERIKEDLDRRA

SEQ ID NO: 16104 - protein, 59 aa, Artificial Sequence
  Synthetic
RELAEEFLRRHKELVERIREIHERLRERLEELLRRIEELHKRLEDELREVLKRIEDEIR

SEQ ID NO: 16105 - protein, 57 aa, Artificial Sequence
  Synthetic
KKEEDLDESNKRARDELKEMNDRLRKIVKEIEDELRRLNEEARRSNEELRRRVEERL

SEQ ID NO: 16106 - protein, 59 aa, Artificial Sequence
  Synthetic
DELAKKVIKEHEDLVREVLKRHEDLLRRARELLKKIKEIHDRLLDEHRKLVEDIEREAT

SEQ ID NO: 16107 - protein, 57 aa, Artificial Sequence
  Synthetic
DRERELEKSNRELERELREALKRVKEIIDRIRKTLEDMNRRLKRSNEEAERRLREKA

SEQ ID NO: 16108 - protein, 59 aa, Artificial Sequence
  Synthetic
DELAERVIREHRRLAEEIRRLIEKLKREIEELLERARRTHEDLLRKHKELVKKVDEEIR

SEQ ID NO: 16109 - protein, 57 aa, Artificial Sequence
  Synthetic
DDEEEVKRSNDELRKEIKEAEERLEKSNRELEEDLRRMNRELEESNKRLRELLEREA

SEQ ID NO: 16110 - protein, 59 aa, Artificial Sequence
  Synthetic
KELAEDMLRRHRDLVREIRELIDKLTRDHDRLVKEAREIHKRLTERHRKLVEDIKRETD

SEQ ID NO: 16111 - protein, 57 aa, Artificial Sequence
  Synthetic
SKEEELEKSNRKLKEDLERMNEDLKRILREVEDVLRRIEEELEKLVRELEEILKRRV

SEQ ID NO: 16112 - protein, 59 aa, Artificial Sequence
  Synthetic
DELAEEVIDRHRDLVRRIKDEHRKLTDELRKLLEDIERLAEEAKRKLEKLIEDVEREAN

SEQ ID NO: 16113 - protein, 57 aa, Artificial Sequence
  Synthetic
SSEERVKKVVEELEDLIRKIREEHKDSIRENRKVVEDIRERVKELITELKKELEDKL

SEQ ID NO: 16114 - protein, 56 aa, Artificial Sequence
  Synthetic
TEDLLRRLRKLIEDVFREARENLKRHKKMSKEAKEKLEELLKRLRDLIKEAREKIK

SEQ ID NO: 16115 - protein, 59 aa, Artificial Sequence
  Synthetic
SEADEVLRTHEELVRELEERAKEILRRHRKLSEESERKAREVLKTLRDLIRELKKLADE

SEQ ID NO: 16116 - protein, 59 aa, Artificial Sequence
  Synthetic
EEIARRIEESEDKSRRIIDEVRERVRKSIEENKRVVEEVRERVERLIKELDKIVEDIRR

SEQ ID NO: 16117 - protein, 60 aa, Artificial Sequence
  Synthetic
DELEKVIEELKRRIEEVKKELTELNKELKDVSKEIEDVIRDLNRELKKLSDRIKELADRD

SEQ ID NO: 16118 - protein, 59 aa, Artificial Sequence
  Synthetic
EEIRRRLDEVLRKAEEDLRRAEESNDEHLRKSKEDVERARKSNDKHLDDNRKTLEEATR

SEQ ID NO: 16119 - protein, 60 aa, Artificial Sequence
  Synthetic
SDVEDLLRRLRKLTKDIEERVKELNKKLEDVSRDIKRRVEEVLKKLEDVLRKARDEVRKL

SEQ ID NO: 16120 - protein, 59 aa, Artificial Sequence
  Synthetic
DRAEKELRKILEDHKEISDRVRRSNEKLLRDHRRTSETVKRRLEKVLEDIRKELEDAKR

SEQ ID NO: 16121 - protein, 61 aa, Artificial Sequence
  Synthetic
DVEERVKTIVDDIERTLDEVRRRLEESHKRLEDALKEVDDRLKKLLKETEEVLKRIEDERG

SEQ ID NO: 16122 - protein, 59 aa, Artificial Sequence
  Synthetic
KEKVEELLRRLREILERVTRRLEEVLKRHRDLVEEVKKELERVLEDHKRLSEDAERRAR

SEQ ID NO: 16123 - protein, 60 aa, Artificial Sequence
  Synthetic
SVEEALEKSVKESEEVLKKAEKELRESHEDAKRVLKEVRDELERLMEETKKELRDVERKR

SEQ ID NO: 16124 - protein, 59 aa, Artificial Sequence
  Synthetic
KEKVDRILKKDKDLIDRVRRELKKMLDRHRKLVEDVKRELEEALKEHKDDSKRVRDKLK

SEQ ID NO: 16125 - protein, 60 aa, Artificial Sequence
  Synthetic
DIEDRLERVVRDAKRVLADVEDKLRKLLEETERMLRRVKRELERSHEEAEEELRRVEEER

SEQ ID NO: 16126 - protein, 59 aa, Artificial Sequence
  Synthetic
KKLLEDILRKLRKIIEEVKRTLEEALKRHRDLTRKVVEELEDLLRKHRRIVEEVKKRLK

SEQ ID NO: 16127 - protein, 60 aa, Artificial Sequence
  Synthetic
DIEDELRKSVKRSEEVLREVEERLKRLLEETKEVLTRARETNEKSHRELEDKLRKIEEER

SEQ ID NO: 16128 - protein, 59 aa, Artificial Sequence
  Synthetic
ESKLRELLKRDKKEIDDVKRELERLLEDHKRLTEEIRRRLKRLNEKHREIVKRVEKELK

SEQ ID NO: 16129 - protein, 60 aa, Artificial Sequence
  Synthetic
DVEDRLRESEKRSEKTLKDVEERLRRSHEDLEKKLREVEKRLRDSHREAEKTLKRVKEEK

SEQ ID NO: 16130 - protein, 59 aa, Artificial Sequence
  Synthetic
KEVVRKILEDDKRLIEEVKKELERVLEEHRRLVEKVKRELEEVLKRHKEIVDDVRRRLE

SEQ ID NO: 16131 - protein, 60 aa, Artificial Sequence
  Synthetic
SIEDELRKIADEARKVLDKVRKDVERSHREAEKKLREIDKRLKDSARDSKRVLDEVREER

SEQ ID NO: 16132 - protein, 59 aa, Artificial Sequence
  Synthetic
EEKLERILRKLKKIIKDVEDELRKLLEEHRELVKKVEKDLRDLLERDRELIEEVERRLR

SEQ ID NO: 16133 - protein, 60 aa, Artificial Sequence
  Synthetic
DIEDRLRTSVKKSRDVLEEVERKLRDSHRRAKEVLDKAREDLRKSKEDSKRVLDDVRRKR

SEQ ID NO: 16134 - protein, 59 aa, Artificial Sequence
  Synthetic
KEKLEDVLRRDEELIDRVRRRLERILEEHEELVKRVEEELRRVLEEDRKLIKRVKEELE

SEQ ID NO: 16135 - protein, 60 aa, Artificial Sequence
  Synthetic
DIEDALRDSERESEEVLKRAREELEKSHKEVKKRLDEVEKTNKDSVDESKKVLDDVRRKR

SEQ ID NO: 16136 - protein, 59 aa, Artificial Sequence
  Synthetic
KELLKKILKEDKELIKRVEEILRRILEEHRELVRRMKKELDELNKRDKELIDRVREELT

SEQ ID NO: 16137 - protein, 60 aa, Artificial Sequence
  Synthetic
DLEEEAKKSVRESERALDEVRKRLDRVRKEVERELRKVEEDLRRSHRKLEDILRRVAEKR

SEQ ID NO: 16138 - protein, 59 aa, Artificial Sequence
  Synthetic
EEAARRILERDKALIEKAREDLKRILDEAREILKEAAKRLEDILRKHKKIVEDVARELE

SEQ ID NO: 16139 - protein, 60 aa, Artificial Sequence
  Synthetic
KIEEEVEKLIRDARRIIEEMRESTERLIERNEEVLETVRREVEKLLRDLERILEKIKREL

SEQ ID NO: 16140 - protein, 59 aa, Artificial Sequence
  Synthetic
EEVLRRILEEIRKIVEDVRRELDTLNRELEELTKESRRRAEELLRRLKEIVKKVERDAE

SEQ ID NO: 16141 - protein, 59 aa, Artificial Sequence
  Synthetic
REVEEILKEVETLIRENKKKLEEWLRTHEKLNEDLERKAREILTRHRRENEDLKRVADD

SEQ ID NO: 16142 - protein, 59 aa, Artificial Sequence
  Synthetic
DEVKRRIEELIKKSKRVNDEANRRVDKLVKDTRDKIREIEERIRKLIEESKKLLEDKRR

SEQ ID NO: 16143 - protein, 59 aa, Artificial Sequence
  Synthetic
REVEEILRRVRELIERNRKEVEDWMRRHRRVNEELKRKAREILERIKEMLKTLKEVLER

SEQ ID NO: 16144 - protein, 59 aa, Artificial Sequence
  Synthetic
DEAAKRIEKLIKESRERNEEVNRKIKKLIEDTRRVVEDVRRKVEELVKRLRTELDRARK

SEQ ID NO: 16145 - protein, 59 aa, Artificial Sequence
  Synthetic
SEAEEIAKRAKEAIERNRKLAEEWAKRARDAAERLKELYKRIAERHRKANEELRRAAER

SEQ ID NO: 16146 - protein, 59 aa, Artificial Sequence
  Synthetic
DEARKRIRELIERSKKANKEANDRARKLAEDAKRLNEEANERAKRLAEESREAIKEAER

SEQ ID NO: 16147 - protein, 61 aa, Artificial Sequence
  Synthetic
REVEEVAKELRELIKRTEDLIRRALERNRKLVKETRDLIEKVLRDLRDLLRRLEEEARRRG

SEQ ID NO: 16148 - protein, 56 aa, Artificial Sequence
  Synthetic
DKTLRDLLREHKELVEEAKRRLEESNDEHRREVEDAERRIEEIVRDAKRVVDEIER

SEQ ID NO: 16149 - protein, 61 aa, Artificial Sequence
  Synthetic
SEVEKVVTELRRLIERLEEVIRRALDTNRKLLEDTEKEAERMMRKLEELIKDLERDLREKG

SEQ ID NO: 16150 - protein, 56 aa, Artificial Sequence
  Synthetic
KETLRKLLKELREVLDKAREDLERSNRDHRRAVEEIKERLERLLKKLEDVVRKAKE

SEQ ID NO: 16151 - protein, 61 aa, Artificial Sequence
  Synthetic
KEAEEAAKKLKDLIKEDRERARRALEENKRLIDELRKAAKEALDRNRELLERLRDEARKRG

SEQ ID NO: 16152 - protein, 56 aa, Artificial Sequence
  Synthetic
KDTAEDLLRRATRDSEEAKKKLKKSNEEAAKAVEEAKERLKRSVDEATKAVEEAKR

SEQ ID NO: 16153 - protein, 59 aa, Artificial Sequence
  Synthetic
SEVEKALEESKESLKTIKKIAKDVLTESEESLRRTKKLIEEVLEASKRSIEELKRLSEA

SEQ ID NO: 16154 - protein, 56 aa, Artificial Sequence
  Synthetic
EDELRRLHEDVKRLVEEIAKRLDELHDRHRETVKRAKEELDKLHDRARKEVEDDKR

SEQ ID NO: 16155 - protein, 59 aa, Artificial Sequence
  Synthetic
SEVEKVLKDSEKSIEDAERIARDVLRKSEESIDRIRRIAEEVLKESEKSIRDAKKLAED

SEQ ID NO: 16156 - protein, 56 aa, Artificial Sequence
  Synthetic
ERELDRLHEKLRRVVEEIEKELRESNRKLEEVLRDIKRKLDDLHRKAREILERIRK

SEQ ID NO: 16157 - protein, 60 aa, Artificial Sequence
  Synthetic
SEVEEVLKRIRDVIKTMEDRAREVLKESEKSIKEIRDTIREVLKRSEDSIRRIDEELKKG

SEQ ID NO: 16158 - protein, 56 aa, Artificial Sequence
  Synthetic
KDRLDELLKRAEEVLRKIKEDLRRSNEKLREEVKEAKKRLDDLHRELEDVLREAKR

SEQ ID NO: 16159 - protein, 60 aa, Artificial Sequence
  Synthetic
KETEEAEKLAREAARRSEKLAEEAEKRAKEAIDESKELADRARDTARRADEDLERLAREG

SEQ ID NO: 16160 - protein, 56 aa, Artificial Sequence
  Synthetic
REKLDDLLRRHNEKVKRAKERLDRLLEEHEKRIRDAERDLERLERELKKKAEDKRR

SEQ ID NO: 16161 - protein, 60 aa, Artificial Sequence
  Synthetic
SETEEALERLRKMIEDSRRLAKKIREDLREMIERSRRLAEKVRRDDEKSSEDLRRVTEEG

SEQ ID NO: 16162 - protein, 56 aa, Artificial Sequence
  Synthetic
KDRLDRLLEEHNRIVKEIKEDLDRLLREHNEIVKRIKDDLDRLHEENRRLLEESER

SEQ ID NO: 16163 - protein, 59 aa, Artificial Sequence
  Synthetic
SKEDLVRELKKKLEEVVKRSREESERSLRKLEKVIRDFRRESERLKKESRDVVKKARED

SEQ ID NO: 16164 - protein, 55 aa, Artificial Sequence
  Synthetic
EEVLKEIDDLIRRDEERLRRVLRESEELIKEIKKRAEEMLTRSKKLTRDIEEKTR

SEQ ID NO: 16165 - protein, 59 aa, Artificial Sequence
  Synthetic
RDREELRRLEEELRRVFEESRRRSERSKKELDKIVKEAEKASKRSLDKLKRVFDELRRR

SEQ ID NO: 16166 - protein, 55 aa, Artificial Sequence
  Synthetic
EDVLRDARELIERDREELERVLRDSDRLVREIKKRIEEMLKRSEDLIEEIERRAR

SEQ ID NO: 16167 - protein, 61 aa, Artificial Sequence
  Synthetic
SEVERVLKEIEDLIEEIERRAKTVLEEIDKLTKEIEEVVKRMLDRDRELIKTAEDLLRKNK

SEQ ID NO: 16168 - protein, 58 aa, Artificial Sequence
  Synthetic
RVRKALEDLLRKVEEVVRRVREELKKLERKDREVVRKVEEDSERSLRELEKVADEARK

SEQ ID NO: 16169 - protein, 60 aa, Artificial Sequence
  Synthetic
SEVEKVLRELKELTRRIREEAERLLREDERLLREAERIARELLETNKRLIEEIERRLRER

SEQ ID NO: 16170 - protein, 58 aa, Artificial Sequence
  Synthetic
RVKKDLEEVRKRDREVVEEVRRRSEKSKEDVRRLVEKIRKDSEDSLKELKEVVEEARR

SEQ ID NO: 16171 - protein, 60 aa, Artificial Sequence
  Synthetic
DEVEKMLEELKRLTDKIREDAERLLKRSEELTEEIKRLIDELLKEIEELIKEARDIVRRN

SEQ ID NO: 16172 - protein, 59 aa, Artificial Sequence
  Synthetic
ERVRRELEKVEREDRKVVRDAEEELKKSRKKSEDVVKEAKERLEELLRRVKRVVDEVRR

SEQ ID NO: 16173 - protein, 60 aa, Artificial Sequence
  Synthetic
SEVERVLKEIEELTRRLREEAEELLERSERLTEKIRRRAEELLKRNEDLIEKIERDLRRN

SEQ ID NO: 16174 - protein, 59 aa, Artificial Sequence
  Synthetic
DRVKKALDELRRRDREVVKRLEEELEKSKKKSEDVVREVEEKSERSKRKLERVADEARR

SEQ ID NO: 16175 - protein, 57 aa, Artificial Sequence
  Synthetic
SEAEKLLKEDEDLIRKARDEIRKVLEDDERLIEEVERKSREMLKRIKEIIDDMRKRI

SEQ ID NO: 16176 - protein, 59 aa, Artificial Sequence
  Synthetic
KEVVEEVRKSRKKSEDVLREVERELKKSFEKSKRVNDDSKKKLDELKREADEVIKRLKD

SEQ ID NO: 16177 - protein, 57 aa, Artificial Sequence
  Synthetic
SRAEELLKRDEELIDTVRRRIEKMLREIKEIIDRVKRKSEKMLEDDERLIREVEKRV

SEQ ID NO: 16178 - protein, 59 aa, Artificial Sequence
  Synthetic
EEVLRELEKSRKKSEEVLERVKRELEKLERRAEEVNKESEDRLRESEKESKKVIDELRR

SEQ ID NO: 16179 - protein, 57 aa, Artificial Sequence
  Synthetic
RRAEELLRTIKEIIKRIDDELKRVLDDDDRLIDELRKESERLLEEIERIIRRIEREV

SEQ ID NO: 16180 - protein, 59 aa, Artificial Sequence
  Synthetic
EEVLRELRKLEEEAKAVIDKARRELERSERKSEELNRESKRRLEELSRRAKRVIDELRK

SEQ ID NO: 16181 - protein, 57 aa, Artificial Sequence
  Synthetic
DEVRRLLKEIEDIIRRIEEDIRRMLEKDRKLIEEVERKSKEMLDRDKRLIEELEKRL

SEQ ID NO: 16182 - protein, 59 aa, Artificial Sequence
  Synthetic
EEAVRELDRLRREAEEVLDRVRKKLDKSRKDSERVNEESERRLERSAEESKRVLDELRR

SEQ ID NO: 16183 - protein, 60 aa, Artificial Sequence
  Synthetic
DVREELKKVVDKAEKVSRKSRDDLDKVRKRVEEVNRDNERRLREIAKKVKEVLRDIDRKR

SEQ ID NO: 16184 - protein, 59 aa, Artificial Sequence
  Synthetic
KEVVKRLLEDVDRLIREVEKESKRLLDEIEEMIEELKRRAEENLKTIEDIIKDVTEKAT

SEQ ID NO: 16185 - protein, 59 aa, Artificial Sequence
  Synthetic
REVEEVLKTVRKLIEELERSSRKSLKEVKELLEKLEEDARRSLKRVKELLKELEDRSRT

SEQ ID NO: 16186 - protein, 59 aa, Artificial Sequence
  Synthetic
EEAKKRIEDLIRELEELLRESSDRHRKLDEELKKLLKDVTDAHRRLMEELRKLLEDIET

SEQ ID NO: 16187 - protein, 59 aa, Artificial Sequence
  Synthetic
DEVETILRDIKRLLREIEELARKSSKKFKELLERLEETARRSLTRIERLLEEVEDISRT

SEQ ID NO: 16188 - protein, 59 aa, Artificial Sequence
  Synthetic
EDAAREIEKLKRELERLLEEASRTHEELTRRLEKLLEDATREHERLKRELEKLLEDIKK

SEQ ID NO: 16189 - protein, 59 aa, Artificial Sequence
  Synthetic
REVEEILRKIRELLEELRKRVEESRRRIEELLKKLEEEVRESEKDVRRLLRELEEISRT

SEQ ID NO: 16190 - protein, 59 aa, Artificial Sequence
  Synthetic
EEAAKEIEKLVKELEELLKRASDKHRKLSKDLEDLLREVTERHRRLEKELEDLLREIER

SEQ ID NO: 16191 - protein, 59 aa, Artificial Sequence
  Synthetic
SEVEKLLEEARRLLKELEDSSRRSVEEAKRLLEELKRRVEESVRRIRELLKDLERLSSR

SEQ ID NO: 16192 - protein, 59 aa, Artificial Sequence
  Synthetic
ERAKEALRELEKRLRDLLRDSSRLHEDLARDLKRLLDEVTEEHDKLRRELRKLLEDIKT

SEQ ID NO: 16193 - protein, 59 aa, Artificial Sequence
  Synthetic
SEVEKVEEDVKRLLKEIEDSSRRSLEKAKRLLEELRRSSEESLKRIRDLLEELRELSRT

SEQ ID NO: 16194 - protein, 59 aa, Artificial Sequence
  Synthetic
EEAKKRIEELKRELEELLKKSSEEHKKLVKELKELLKKSTEDHEKLKRDLRKLLEEIRT

SEQ ID NO: 16195 - protein, 60 aa, Artificial Sequence
  Synthetic
DSEDLMRRVKEELDKLVKDSRKRSEDLKRENEELLRRSEEALEKSVRDADRLFEEIKRTK

SEQ ID NO: 16196 - protein, 55 aa, Artificial Sequence
  Synthetic
RDVLKTLKDLIRELKRHSEEVEREDKETTDRLRRHSEKALRTNEEIIRRIEERAR

SEQ ID NO: 16197 - protein, 60 aa, Artificial Sequence
  Synthetic
SVDEALRDIERKVEELMRESDERLRRVKKEVEDNVRRSEEELKRIADEMKELLDRARERG

SEQ ID NO: 16198 - protein, 59 aa, Artificial Sequence
  Synthetic
EDLVREVLKKLKELIDRWRDLSRRLKERLDTLIKEHHELSKRLLERLKRLIDEARKKLN

SEQ ID NO: 16199 - protein, 59 aa, Artificial Sequence
  Synthetic
SEVEELKREADDVNRRAEELARETLKKIEKVNREVKRRLEEALREIEELLRRAEEIVRR

SEQ ID NO: 16200 - protein, 59 aa, Artificial Sequence
  Synthetic
EEARKRLEEVVRHNKKLDDEHRKALDELRKHNEDLDRRSKEELDKLRKRLEDLLRKVKE

SEQ ID NO: 16201 - protein, 59 aa, Artificial Sequence
  Synthetic
REVEELLKEIEEVLKKSERLSRESLKKIREVLERIERLARENVKRMKEVIDRVRELAER

SEQ ID NO: 16202 - protein, 59 aa, Artificial Sequence
  Synthetic
EDARRALEELRKRVEEVNKKSRDDLERLTREAEELNRKNEEDLRRLEKEVKDLLDEIRR

SEQ ID NO: 16203 - protein, 60 aa, Artificial Sequence
  Synthetic
SSRETVKRLTEEARKLLEDWKDRNRDVERKVEEIIERIRRTNEKSERDARRKLEEVDKRR

SEQ ID NO: 16204 - protein, 56 aa, Artificial Sequence
  Synthetic
TEELKREIERILEELRRLMKEDKEELERILERLRRLAEEDKKENEEILDRVDKKAK

SEQ ID NO: 16205 - protein, 60 aa, Artificial Sequence
  Synthetic
STEETITDLKREAEEILRRWREENKRVSDEAAESVKESDKTNKKSKDDLKRVLDEVDTKE

SEQ ID NO: 16206 - protein, 56 aa, Artificial Sequence
  Synthetic
AKELEDEVREALKRIRKLIEEDRRKLKRILDEHRRLTEEDRERNERVLRELREDTR

SEQ ID NO: 16207 - protein, 60 aa, Artificial Sequence
  Synthetic
SVDESLEEIRKEVERLLRKWKEDNKEMRKRIRELLEDWRKKVEDSKKRAKDLIDEVKKRR

SEQ ID NO: 16208 - protein, 56 aa, Artificial Sequence
  Synthetic
TRELEKEAEDALRRLKKLIEEDRRELEKILKELEDLMREDTKENEKILREAEERSR

SEQ ID NO: 16209 - protein, 60 aa, Artificial Sequence
  Synthetic
SVEDEIRRLTEEIERTLRRWREEVKRSEDRAEESIKRSDEKNKESKERLDKVLDEARRRR

SEQ ID NO: 16210 - protein, 56 aa, Artificial Sequence
  Synthetic
LRELLKEVEDVLEELKELIKRDTEENKRILDEHKRLTEEDEKRNREVLERLKRKTD

SEQ ID NO: 16211 - protein, 60 aa, Artificial Sequence
  Synthetic
ESEETLKEVKKEIEKLIKRAEEINRESAERLKRILEEWKKEVDRSEKRLREVLDEVRRRR

SEQ ID NO: 16212 - protein, 56 aa, Artificial Sequence
  Synthetic
RRELLEELKRVLDRLKKLIDDDRRKNEKVLRDLEKLMREDADENREVLKRLEDKAR

SEQ ID NO: 16213 - protein, 60 aa, Artificial Sequence
  Synthetic
SDEERVIKEVEDLIRRIREDNKRLLDEAEKIIRRVAEDNKKLVEDHRRMLRKIDEEAKRG

SEQ ID NO: 16214 - protein, 55 aa, Artificial Sequence
  Synthetic
EDVKRLEEKVRKLLEESKRKLKRLAEEVRKLIKDSRDKIRELERENKEIIKKVKD

SEQ ID NO: 16215 - protein, 60 aa, Artificial Sequence
  Synthetic
DREKEVVDTLRRLIEDARRDNKDLVETHRRLLEDLERDNRELVRTHEERLEEIERRARRG

SEQ ID NO: 16216 - protein, 55 aa, Artificial Sequence
  Synthetic
EDVRRLEKEVEELLRESDRRVEDLERKNREILKRSEDLIRRLKEENRRIIEKVRK

SEQ ID NO: 16217 - protein, 59 aa, Artificial Sequence
  Synthetic
DDERRVVEELERMIRELEKKIREIVKRHEEALKRLKEDNDELSKRHKKMVEEIKRRADE

SEQ ID NO: 16218 - protein, 55 aa, Artificial Sequence
  Synthetic
EEVRRLKREVEELLKRAEELLKRLEDRNRKILRESEEDIKRLERENREIITRVRT

SEQ ID NO: 16219 - protein, 61 aa, Artificial Sequence
  Synthetic
KELDEIIRRVEELIKDDERRNREVLKRSDESTKESHDKARRILEESEKTTEDIKRKVEKDG

SEQ ID NO: 16220 - protein, 56 aa, Artificial Sequence
  Synthetic
EDKIRRLERESRELLRDSEDKVRKSKRKDEENLKRIEEEARRSEKRDEELLREAAK

SEQ ID NO: 16221 - protein, 61 aa, Artificial Sequence
  Synthetic
RELDEIIKTLEKLIEDSHREAREIVKEVKKRLDDDKRRNEEVLKESRETTERIRKEIEERG

SEQ ID NO: 16222 - protein, 56 aa, Artificial Sequence
  Synthetic
EEKIRRLEERARRNVEEMRKLAEELEKESRRILKESAEAVKRSKDEDRKLLEEAKK

SEQ ID NO: 16223 - protein, 59 aa, Artificial Sequence
  Synthetic
SETDKVIEESEKTNRDIKRHSEEVVKDSKRTNTEIERTVEKMIRELEEILERIKRLADN

SEQ ID NO: 16224 - protein, 56 aa, Artificial Sequence
  Synthetic
KDKAKKLKDETDRILETSERLLKALRDETDAIKRKVEELVRRVKEELDRILKKTED

SEQ ID NO: 16225 - protein, 59 aa, Artificial Sequence
  Synthetic
SETDRVVEESERTNKEIERHSEEMVRDSERTNKEIEEHSREVIERLREILERIERLVRK

SEQ ID NO: 16226 - protein, 56 aa, Artificial Sequence
  Synthetic
EEKMRRLKEETDRILDKSRRELKRLKDETDKLLEDSERLLREVEKTLRRILEEARK

SEQ ID NO: 16227 - protein, 59 aa, Artificial Sequence
  Synthetic
SETEEVVKTLKRLLEEIKKHSDDAVRKSEETNKRIREEVERVIKRLKELIEEISELVKS

SEQ ID NO: 16228 - protein, 56 aa, Artificial Sequence
  Synthetic
EEKLKRLKDALDRILEESKRLADELKKRTKDILDEAKDALRKIKEELDKLVEDAER

SEQ ID NO: 16229 - protein, 59 aa, Artificial Sequence
  Synthetic
SETDKVVREVEELIRRLEEHSRRVVEKSERTNEEIERHSRDVIRRSKEINDRIEELARN

SEQ ID NO: 16230 - protein, 56 aa, Artificial Sequence
  Synthetic
KDKMKRLKEELDKLLDDSRRLMKRLKDETDKILDKSRDLLAKTKRESDRILEEAER

SEQ ID NO: 16231 - protein, 59 aa, Artificial Sequence
  Synthetic
SETDKVVDDSRKTNEDIKRHSEEVIRRLEELIREVEEHSRRVEDEVRRILDEIRKLAED

SEQ ID NO: 16232 - protein, 56 aa, Artificial Sequence
  Synthetic
KDKATELKKDTDRILKESEDALRRIKKELDDLLRTSKRLAEELKKELREILERAKR

SEQ ID NO: 16233 - protein, 59 aa, Artificial Sequence
  Synthetic
SETDEVVERLEKILKDIREHSERAIKKLEDILREIERHSRKVIRDSERINTEIKKLAEA

SEQ ID NO: 16234 - protein, 56 aa, Artificial Sequence
  Synthetic
KDKLTTLKKKLDDLLDTSRRLVEKVEEDLRRILEASKRMLEETKKRSKEILDRIRK

SEQ ID NO: 16235 - protein, 59 aa, Artificial Sequence
  Synthetic
SESEEVVREVDKILKEIRKHSKDVIEKLKKLIDDIRRRVRKVIRDSEEINKRIEDLARE

SEQ ID NO: 16236 - protein, 56 aa, Artificial Sequence
  Synthetic
EEDMRRLKERLDKILDDSREMLKRLKDELDEVLEEVERLLRETKKRSDEILKRIKD

SEQ ID NO: 16237 - protein, 60 aa, Artificial Sequence
  Synthetic
SEIEDVIRRAEELIKEDKKRVEDVVREIEKLIRDDARKVRRAIEELKRLLREIEERVREE

SEQ ID NO: 16238 - protein, 56 aa, Artificial Sequence
  Synthetic
KEEAERLRRELEDLHRDVKRLIDELEKDLRRLLEESKRRADRVKEELRRLREEVRK

SEQ ID NO: 16239 - protein, 60 aa, Artificial Sequence
  Synthetic
SEADKAAEDAKRLIDKDREDVERAVKRAEDLIEKDREDVDRAIKESEELNKRAEDEARRR

SEQ ID NO: 16240 - protein, 56 aa, Artificial Sequence
  Synthetic
EEKARRLKEEADKVAKESKELADRLKERADRLHKRARELAERTKEDTDRLVEEAKR

SEQ ID NO: 16241 - protein, 60 aa, Artificial Sequence
  Synthetic
SEIDEVVKEIEKILEDDKRRVDEAIEELEKLIREIREEVRRVIKESEDLNKEIRDRVRKN

SEQ ID NO: 16242 - protein, 56 aa, Artificial Sequence
  Synthetic
KDKAERLRRELKKIMEDSRRLADEIKKRLDRLLEEVKEEIERTKRETDRLLEEVRR

SEQ ID NO: 16243 - protein, 60 aa, Artificial Sequence
  Synthetic
SELDRVVEEIDRLIREDEKEVRDMIRESEKLNRENEETNRKLLEDWDKLSKDIRDRVDKN

SEQ ID NO: 16244 - protein, 56 aa, Artificial Sequence
  Synthetic
DKKARELKEKLDELKKRSEKLLEDTKRETDKLHERSRRELEKLRRKDEELVKRVKD

SEQ ID NO: 16245 - protein, 60 aa, Artificial Sequence
  Synthetic
SEIEEVVERIERLIKRIKEEVERALKESEDLIRDIERRVRELLEEWDRLSERIREVVERN

SEQ ID NO: 16246 - protein, 56 aa, Artificial Sequence
  Synthetic
KDELRRLKEELRKLLEDVKKLLEESKKKTDDLLKRAEDELRKLKEKDDDLLRKVKD

SEQ ID NO: 16247 - protein, 61 aa, Artificial Sequence
  Synthetic
EELDRVVEELDRLIRDNKRRNDEALKESDRLIRENERRNRKAARDWEELSKEIEDRVRKNK

SEQ ID NO: 16248 - protein, 56 aa, Artificial Sequence
  Synthetic
KDKLTTLRKKLDDLHKESRRELERSKKKTDDLHRKSREEVRKLREDDERKLREIKK

SEQ ID NO: 16249 - protein, 60 aa, Artificial Sequence
  Synthetic
SEADEAAKKIEKLIEDNERKNRKALKEWDELTRENEKRNRDAIKESEDLIKEAADEVRRR

SEQ ID NO: 16250 - protein, 56 aa, Artificial Sequence
  Synthetic
EEKARRLREEAEELHRRSEEAARRAEKKDREAHKRSREAIKRTKDDTEELLKEAER

SEQ ID NO: 16251 - protein, 61 aa, Artificial Sequence
  Synthetic
DEIDKVVRKIEKLIDDNRRENEEMLRESEKLLKENEKKNEKAIRESEELIRRIEKRVRENK

SEQ ID NO: 16252 - protein, 56 aa, Artificial Sequence
  Synthetic
KDKARRLEEELKELHKRSKEELEKSKEKTDRLHDKSRRLIEETERRTEELLERVRR

SEQ ID NO: 16253 - protein, 60 aa, Artificial Sequence
  Synthetic
SVEDEVERLERDAEEISRRSETELRRLKKEVEDLNRESKKLLDELREEMEKILKKVREDS

SEQ ID NO: 16254 - protein, 59 aa, Artificial Sequence
  Synthetic
KDEVKRLVEEIERLLKRAEELSRELVRRIEKLIRELAEESRRLVDEIREVLKRLKDRAD

SEQ ID NO: 16255 - protein, 60 aa, Artificial Sequence
  Synthetic
SEIETVLEKLKRLLEEDRELVKRVEDKIRRIIEEDEKTVRDIKKRLDDILREIRDVLEKR

SEQ ID NO: 16256 - protein, 56 aa, Artificial Sequence
  Synthetic
EEELKKVEDELDRVRKETERIIKELREELEELHKRARDLLKEVRDELRKLLEEAKK

SEQ ID NO: 16257 - protein, 60 aa, Artificial Sequence
  Synthetic
SEIEDVVRRIDELLREDKRRVDEVLERNRKLIEDDERLSREIARELDEIIKRLREVVKSN

SEQ ID NO: 16258 - protein, 56 aa, Artificial Sequence
  Synthetic
REEVRKLKERLDKILEDTRRLLEESKRRLDRLHERHRETSEDMKRRIDKLLEEVRK

SEQ ID NO: 16259 - protein, 60 aa, Artificial Sequence
  Synthetic
KEAEDVVREVEELIDRDRKLVERVLRENERLLKEDRDTVKKVLEELEEILKDIERVVRER

SEQ ID NO: 16260 - protein, 56 aa, Artificial Sequence
  Synthetic
EELLRRLKEEIERLLERSRRLVKESEERLDRIREETKRELDRVEEKLRRLLEEVKR

SEQ ID NO: 16261 - protein, 60 aa, Artificial Sequence
  Synthetic
SEIEKVVEEIKKLLKELKETSERILRRNEKIIKEIEETSREVLKELERILEEIEDVVRKR

SEQ ID NO: 16262 - protein, 56 aa, Artificial Sequence
  Synthetic
KDRLKRLRDELERILRDHERLSRESKDKLDKLLERHKELSDEVRKKLKELRDRADT

SEQ ID NO: 16263 - protein, 61 aa, Artificial Sequence
  Synthetic
REIEEVEKEIERIIERIERTSRRVKEENDRLLEEIKRRSEEVKKRNDDIIREIRRVVEEDK

SEQ ID NO: 16264 - protein, 56 aa, Artificial Sequence
  Synthetic
ERRLKELKRKLDKLREDHERLSRRSDEELRRLEEEHKRLSEDSKRELDKLLDEVRK

SEQ ID NO: 16265 - protein, 60 aa, Artificial Sequence
  Synthetic
DEIERVLEEAKKLIRDLEEHSRRVEEENKRLLKEIRETSERVKRELDRILEEIRKTVERR

SEQ ID NO: 16266 - protein, 56 aa, Artificial Sequence
  Synthetic
DEKLRRLEEELKRLLDESKRLLEESEDELRKLEEEHRKLSEEVKRRLDELKKEVET

SEQ ID NO: 16267 - protein, 60 aa, Artificial Sequence
  Synthetic
REIEEIVERVKEIIDRIRRHSKEVEKENEKIIERIRRRSEEVLRTNEKALRDIERRVRER

SEQ ID NO: 16268 - protein, 56 aa, Artificial Sequence
  Synthetic
KDELKRLKEELERLLRESKKLVDESKRRLEELLREHRELSKRSRDKLDELLRRVEK

SEQ ID NO: 16269 - protein, 60 aa, Artificial Sequence
  Synthetic
SEIEEVVRRIREIIEEIRRLSEAALERNKRIIDEIRRTSKRVKEEIERIIRDIRRVVEER

SEQ ID NO: 16270 - protein, 56 aa, Artificial Sequence
  Synthetic
REDVRKLKEDLKELLKEHKRLSEESKKRLERLLEEHERISEELKRRLEKLLKEAED

SEQ ID NO: 16271 - protein, 60 aa, Artificial Sequence
  Synthetic
SEIEEVVKKVKKIIDEIRERSREALERNEKILEELKRHSEEVTRRAEKIIEEIKRVLEKR

SEQ ID NO: 16272 - protein, 56 aa, Artificial Sequence
  Synthetic
KDELTKLEKELEDLREEHRKLSKDSKDRLKKLLDESRELIERLKEKLKRLLEEAER

SEQ ID NO: 16273 - protein, 59 aa, Artificial Sequence
  Synthetic
SEVEEMLKRLDDILKKHRELVKEMKEELDRVIETHRRLVEEVRRRLEKSNDEIDKLVKA

SEQ ID NO: 16274 - protein, 59 aa, Artificial Sequence
  Synthetic
ERVEKALKEVRERLERSHKKAKEDLDRVREEARKSHEDVKRLSEEDRKKSEDLADEVRR

SEQ ID NO: 16275 - protein, 59 aa, Artificial Sequence
  Synthetic
REVEEALERLRKLIEDDRELVKRAKEKLDKLLKDDRKLVEDVLRELKRSNDEVKKLVDS

SEQ ID NO: 16276 - protein, 59 aa, Artificial Sequence
  Synthetic
KRAEEELRRVKEEVDRVLEESKRRLDEVRRRLERIEEESRTKSEEDRKRSEDLVREAER

SEQ ID NO: 16277 - protein, 59 aa, Artificial Sequence
  Synthetic
SEVERLVEDAERVIDEHRKLVTEMERRLERVNREDEKLVRKVLEELKKSNEEIKKLRED

SEQ ID NO: 16278 - protein, 59 aa, Artificial Sequence
  Synthetic
ERAKKLLDEIRKKLDDSNREVEKRSRDDERHTERVVRESKRLSEEDKKRSDELADETRK

SEQ ID NO: 16279 - protein, 59 aa, Artificial Sequence
  Synthetic
SRVEEVKKELDDLIRRHKELVEKVRKELKDLLDKHERLVEEAKKEIEKLIETLKRLAEN

SEQ ID NO: 16280 - protein, 59 aa, Artificial Sequence
  Synthetic
RRAEDELRKVRKEVERSNKEVEEILDDVRRKVEESDKRVKEILKKLREDVKKLLDEVRK

SEQ ID NO: 16281 - protein, 59 aa, Artificial Sequence
  Synthetic
SEVEKLVADADKLIKDHRKLVEEAKKRLDEVNERHRRLVEEVERRLDKSNKELEDLVRS

SEQ ID NO: 16282 - protein, 59 aa, Artificial Sequence
  Synthetic
RRADEELRRISERVKRSNEDVRKKSEDDKRHTDESDRDVKRLSKEDRERSETLMDRVRE

SEQ ID NO: 16283 - protein, 59 aa, Artificial Sequence
  Synthetic
SRVEDVERELEEEIDKHRKEVEDAKRRLDELIRRHKEEVKKLKKKLDDLIEELERLARN

SEQ ID NO: 16284 - protein, 59 aa, Artificial Sequence
  Synthetic
ERAKRSLDRVREKIEKSDRTAKDLLKKVEEEVRKSNERVKELLKRVKDAVDDLLRRRRK

SEQ ID NO: 16285 - protein, 59 aa, Artificial Sequence
  Synthetic
DEVEEVVKRAEDVIRTHKELVKKAKEDLDKIIEDIERELKKMLEDLERSNRRVEELVRG

SEQ ID NO: 16286 - protein, 59 aa, Artificial Sequence
  Synthetic
ERVKKILDDIRRELEESNKKVEEDLRKAEEDLEELLRRARELSKEDEKKSRKLVEDARR

SEQ ID NO: 16287 - protein, 59 aa, Artificial Sequence
  Synthetic
DEVDEVVKRLEDIIRKHETLVKKAKEDLDRVNEEDTKLIRDVLRRLKESNEEMERLVRS

SEQ ID NO: 16288 - protein, 59 aa, Artificial Sequence
  Synthetic
ERVKEELRRVEEDVKKSDEDARRLSKEDRDHTRENFKRSEELSRRDEETSRRLMEEVKR

SEQ ID NO: 16289 - protein, 61 aa, Artificial Sequence
  Synthetic
KDVEDLVRKAEELLKRHREDVTRLLERLKKVNKDHERLVKELKRRLEELLREVRELVERDG

SEQ ID NO: 16290 - protein, 59 aa, Artificial Sequence
  Synthetic
DEVERRLRRLEEELKKSHEEVERRLDEVRRHSKRSHDELRKVLRKLEEDLRRLAEEVKT

SEQ ID NO: 16291 - protein, 61 aa, Artificial Sequence
  Synthetic
SDLEELVKRAEKLLEEHKELVKRLEDRLRELDKRHKEIVERLRKELERLLREIRRIVEEKG

SEQ ID NO: 16292 - protein, 59 aa, Artificial Sequence
  Synthetic
DEAKRKLDELEERLRRSNKELEEKSEENERRTRESNEELERRLEDVRRKLERLREEVER

SEQ ID NO: 16293 - protein, 61 aa, Artificial Sequence
  Synthetic
KDVEDLLRRLEEIIKDHRREVEELLRELTKLDEEHKEEVRRLTEELERLLDEARRLVEEKG

SEQ ID NO: 16294 - protein, 59 aa, Artificial Sequence
  Synthetic
DEAERELERVEREVRKSSDKLRRDSKRNKERTRKSNEELERRLEEVERELRRLVAEVEK

SEQ ID NO: 16295 - protein, 60 aa, Artificial Sequence
  Synthetic
KKVEDLEERLERLLRDAERRVRELLDEARRLLETHRELSKRLLERLEKVNRDIREKAKEK

SEQ ID NO: 16296 - protein, 56 aa, Artificial Sequence
  Synthetic
ERLLRRVEKEVEDLLRTVKDLLRRIEEEVRKSLEESKKLLKEVEDHSRKLLEEIRK

SEQ ID NO: 16297 - protein, 60 aa, Artificial Sequence
  Synthetic
DEDEEVLRRLKELLKTHRKLSEDLLREAEAINEDHRRLSEELLRRLEKLNEEIRRKAKEK

SEQ ID NO: 16298 - protein, 56 aa, Artificial Sequence
  Synthetic
EELLRRVEEEVKKSNEESKKKIKELEEHSRRSNEESERRLREVEEHSRRLLEEIRK

SEQ ID NO: 16299 - protein, 59 aa, Artificial Sequence
  Synthetic
SEVEDIVRKVDEIIRRLERHNEELRKRVEEVLDRLRRHNEKLDRDVKEIIKEIERVIRG

SEQ ID NO: 16300 - protein, 56 aa, Artificial Sequence
  Synthetic
KDLLREIEEKVRRLVRKSEELLRRIAEDVKKVIEDSKDSHKKIEDELRELEERLRK

SEQ ID NO: 16301 - protein, 59 aa, Artificial Sequence
  Synthetic
SEVEDIVRKVDEFLERLKEHNRKLDKEAKELLDRLKRHNEKLDEEAKRLIEEIKRVADE

SEQ ID NO: 16302 - protein, 56 aa, Artificial Sequence
  Synthetic
KDLLREIAEKAERVKEESKRSHDEIADEIRKVEEESERSHREIAEELERLSRRLKK

SEQ ID NO: 16303 - protein, 60 aa, Artificial Sequence
  Synthetic
KDVEDIVREVERLIKELREHNKELVDRAREVLKELKDHNEKLVEDVKRLIEDITRKIRAN

SEQ ID NO: 16304 - protein, 56 aa, Artificial Sequence
  Synthetic
KDLLRDIERKVEKLERDSRRLLREIEEEIRKVIERSKELLERIEKELRDLMRELRK

SEQ ID NO: 16305 - protein, 59 aa, Artificial Sequence
  Synthetic
KEVEDIVEDVKRVLDELRRHNEKLVREVDRLIRELDKHNKELDDRATEIIKRIEEVVRR

SEQ ID NO: 16306 - protein, 56 aa, Artificial Sequence
  Synthetic
KELLERIDEEVKRVEETSRRLLREIAEKVKTLKEKSKRSHEEIRRRLEELADEIRK

SEQ ID NO: 16307 - protein, 60 aa, Artificial Sequence
  Synthetic
SEVEEIVRRVEKLIEDLKRHNEKLVDEVKKVIDTLRKHNEDLVRRVEEVIKRIEEVIREN

SEQ ID NO: 16308 - protein, 56 aa, Artificial Sequence
  Synthetic
KDLLRDIAEKVKTLKEDSRRLLEEIADRVRRLEEDSRRLLEEIRKEVERLKEELKK

SEQ ID NO: 16309 - protein, 59 aa, Artificial Sequence
  Synthetic
SEAEEAAREAKEAIDRLEEHNKKLDEDAKRAIEEARKHNKELDERAKRALEEIEKAARD

SEQ ID NO: 16310 - protein, 56 aa, Artificial Sequence
  Synthetic
TDAARRIAEEVKKLEKKSEDSHRKIAEDVKKAEEDSERSHRDIARRAEEVKKKADD

SEQ ID NO: 16311 - protein, 60 aa, Artificial Sequence
  Synthetic
SEVEKIVREVEKLLEELREDNRDLVRRADKDLERMERHNRKLVKDVEDVLRRIEEVRRAN

SEQ ID NO: 16312 - protein, 56 aa, Artificial Sequence
  Synthetic
KDLLREIERKIREVEEKSRELLREIKKKLEDVARESRRLLEEIARKIEKLSDELRK

SEQ ID NO: 16313 - protein, 59 aa, Artificial Sequence
  Synthetic
SRAERIVEEVEKVITDLERDNRELVRDVRRLLERLERHNKELDDRITEIIKEILRLAER

SEQ ID NO: 16314 - protein, 56 aa, Artificial Sequence
  Synthetic
EELLREIKRKVEELEKRSKELLEEIARRVKEVEEKSRDSHRKIRERLKELVRKVRE

SEQ ID NO: 16315 - protein, 60 aa, Artificial Sequence
  Synthetic
REMEEVLKEAKELLKESNKKAREIDRKIKELLDDSHRKVKETVDRVKRRIEELDRKVKEV

SEQ ID NO: 16316 - protein, 56 aa, Artificial Sequence
  Synthetic
EEVLREVEKELEDNKRELRESHKEIARELERNKEDIDRLVEEIKRRIEELKKRIDK

SEQ ID NO: 16317 - protein, 60 aa, Artificial Sequence
  Synthetic
DEMEKVLKEAEDELRRVEKEVREVDKEAEELLERSHRKVRDIVRRVTEELKRLKDKVEKI

SEQ ID NO: 16318 - protein, 56 aa, Artificial Sequence
  Synthetic
REMLEKLRREVERVKKEVDDSHREIAKKVERNKKEIDKLVREVEREVEELKKRIDK

SEQ ID NO: 16319 - protein, 60 aa, Artificial Sequence
  Synthetic
SEVEEVLEDAKRLLKEVEKRVREIDRRAEDLLRRSHEKVRRIDKDVKRLLREVEKKVEEV

SEQ ID NO: 16320 - protein, 56 aa, Artificial Sequence
  Synthetic
EEVLKKVEDDVRRLDEEVRRSHEDIRKKVEDNKKRIDESHEEIRRLAERVKKEIRK

SEQ ID NO: 16321 - protein, 60 aa, Artificial Sequence
  Synthetic
SEDEKVVKEAKRLLDENRRENKEIDERAEKALEDSHRKVRKIDKEAKELLEKLRRDVEEV

SEQ ID NO: 16322 - protein, 56 aa, Artificial Sequence
  Synthetic
RELLDKVRREVERLKEESKKSHDRIREELRRNKEEIEKSHDEIRRRVEKLDDEIRR

SEQ ID NO: 16323 - protein, 60 aa, Artificial Sequence
  Synthetic
SEVEEVEREVRKLLKESNDKVREIDKEAKKRLKDVEDKAREIDERITKLLKDIEDEVRKV

SEQ ID NO: 16324 - protein, 56 aa, Artificial Sequence
  Synthetic
EEVLRKVEKEVEDNKKELDESHKEVKREVEEVRERIDESHKRIRERADRVKKKIEK

SEQ ID NO: 16325 - protein, 60 aa, Artificial Sequence
  Synthetic
KELEDVLEDVKRLLKESNDEVKEIDDRARRLLEESHRKSEEVDRRAEKRLREIEDKVRKS

SEQ ID NO: 16326 - protein, 56 aa, Artificial Sequence
  Synthetic
EEMLREVEERARKNKEDIEKSHDEIRKEVEDNIRRDRESHKRIEEEARRVMAEIEK

SEQ ID NO: 16327 - protein, 60 aa, Artificial Sequence
  Synthetic
SEVERVLKEADKLLKDNDEKNERVDREVEKLIRDSHEKSKKVDERAKRALDKLDDEVRKV

SEQ ID NO: 16328 - protein, 56 aa, Artificial Sequence
  Synthetic
EEMLREVEKKVETLKKKSDDSHKEIEEKIRRNIEEDDKSHERIREEAEKLKKKIDD

SEQ ID NO: 16329 - protein, 60 aa, Artificial Sequence
  Synthetic
ELEELMKKIEDDSKKNDEDTERLVKEIRDRSKRNREESKKLHDEDRREAKRVLDEARRDV

SEQ ID NO: 16330 - protein, 59 aa, Artificial Sequence
  Synthetic
EEDVRRAIEEVRRLLEKSHRDSRRVIEEVRRLLEKSHRDNRKVNEDSRRLLKKVREDAE

SEQ ID NO: 16331 - protein, 60 aa, Artificial Sequence
  Synthetic
SLEDLVREIREESERNKKETRKLLRRIEEESKRNLDESERLHREDKKRLEDIAERLERRV

SEQ ID NO: 16332 - protein, 59 aa, Artificial Sequence
  Synthetic
EDLVRKVITEVKRLLEESHKESREVIREIKELLEESHEKSKKVNEESKKLAEDVLRKAD

SEQ ID NO: 16333 - protein, 60 aa, Artificial Sequence
  Synthetic
SLEELLKKIREESKRNLDETRKLHREDKEESRKNLEESRKLHEEDRREAERVKRRADREV

SEQ ID NO: 16334 - protein, 59 aa, Artificial Sequence
  Synthetic
EKLVREVVERLRELLRESHERSREVNKRSRDLLRRSHEKSRRLNEESRRLLEEVERRVK

SEQ ID NO: 16335 - protein, 60 aa, Artificial Sequence
  Synthetic
SADELLKKLRDESEKNKDDTRKLLEELRRRAEKNKKDIEDLLREIEKKLREVLEDIKRKV

SEQ ID NO: 16336 - protein, 59 aa, Artificial Sequence
  Synthetic
EEEVKRAVDEVRRLLEESHKKSREVIKRIKKLLEDSHKKVREIVTELDKLIKEVEKKVE

SEQ ID NO: 16337 - protein, 60 aa, Artificial Sequence
  Synthetic
DLKELVDELRKKSDDNLKETERLVREIEKRLTDNKRESERLVREIEKELRDLRERIERTV

SEQ ID NO: 16338 - protein, 59 aa, Artificial Sequence
  Synthetic
KDEVRKAIKEAEELLKRSHEESRRVIERVRKLIEESHRKNREAIKRIRRLIEEIRKEVD

SEQ ID NO: 16339 - protein, 61 aa, Artificial Sequence
  Synthetic
SEIEKVREELKELLERDEREVKRVIDDLRRLIKDLRERVKEVNKRDDETVKEIKKVIEERG

SEQ ID NO: 16340 - protein, 56 aa, Artificial Sequence
  Synthetic
EEVAREVEERSRRVKRKLEELIREIKTELDRVREEIERLSKRDREKNERLREEARR

SEQ ID NO: 16341 - protein, 61 aa, Artificial Sequence
  Synthetic
SEIEDVLRELKKLLTDDKREVERANRDDERTLRDIRRKVEEAIKKLEDLLRDVKRRVDEEG

SEQ ID NO: 16342 - protein, 56 aa, Artificial Sequence
  Synthetic
KDVAEEVERESRKVEKELEDLSERDKERNDRILRTIEELIKRVEEEIRKVKEDVER

SEQ ID NO: 16343 - protein, 61 aa, Artificial Sequence
  Synthetic
SEIEDVLRKLRKLLREDEKRVEDANRRDRDTVRKIEKRSEEAFKESKETNKRIEDKVRKTG

SEQ ID NO: 16344 - protein, 56 aa, Artificial Sequence
  Synthetic
KEVVEEVRDDSRRVEEKLRRLSKEDKEENDKIRRRDRKLVEDLRRDSDRILRKVET

SEQ ID NO: 16345 - protein, 61 aa, Artificial Sequence
  Synthetic
DEIERVVEEVRELLERDKRRSDEVIERLKRLLEKDEEDVDDVIRRSKETNERIRDKIEKEG

SEQ ID NO: 16346 - protein, 56 aa, Artificial Sequence
  Synthetic
KEVVDDLKRLSKKVYDDNKELIDRVRERSREVLRRLKELADELRKLSEKIKRDADK

SEQ ID NO: 16347 - protein, 61 aa, Artificial Sequence
  Synthetic
DDIEEVVKEVEDLLRRDAEDVERAIKELRKLLEDDRDRVRKVNEESRRIIEEIRKAIERRG

SEQ ID NO: 16348 - protein, 56 aa, Artificial Sequence
  Synthetic
KEVVDKLREDSERVKKKAEDLVEEIRRASEEVKKEVDDLSREDEERLEKLKEDARR

SEQ ID NO: 16349 - protein, 60 aa, Artificial Sequence
  Synthetic
SEAEELEDRIRKLLREVEETSRRILKRARELNKRIEEESRRIIKRIKELIDEIKELVRTR

SEQ ID NO: 16350 - protein, 56 aa, Artificial Sequence
  Synthetic
ERLLRKLEREVRRLSEEVTRLDEETRRHSDDLRRRVERLDETTRRELEKLADEVRK

SEQ ID NO: 16351 - protein, 60 aa, Artificial Sequence
  Synthetic
SEAEELIKRAEDLIREIKKRSDDLVREMERLNEEIKRVSDEIIKRIEEVLEEIKKLVKKV

SEQ ID NO: 16352 - protein, 56 aa, Artificial Sequence
  Synthetic
RRLLEKLKRELKDLERRVREENERSKRHSEELVRRARKLNEKTDKDLKRLEEETRR

SEQ ID NO: 16353 - protein, 60 aa, Artificial Sequence
  Synthetic
REIEEVRKEVERVRKRYKDEVRKIVEDARRVLEEHKRRVEKLLEELERILREAKRLTDEG

SEQ ID NO: 16354 - protein, 56 aa, Artificial Sequence
  Synthetic
EDMLREIEKAVRELNEESKELLERIEREVRKSEERSKEVIKEIAERARKVVEDTKT

SEQ ID NO: 16355 - protein, 56 aa, Artificial Sequence
  Synthetic
SEAEKVLTDNRDTLRRLKEELKKVLDENRKTLEELDKRLEEVHKRHNEELDRIRKD

SEQ ID NO: 16356 - protein, 55 aa, Artificial Sequence
  Synthetic
ERVKEELKRIDEDLKRVVDRIKEKAEDIDRKLKKRVKEIMDKARESLKTLEERVK

SEQ ID NO: 16357 - protein, 56 aa, Artificial Sequence
  Synthetic
DEMREVLKRLRELVEELRRELEEVLRRNRETLKRLEEELRRVHKEHNDVLKEIRDK

SEQ ID NO: 16358 - protein, 55 aa, Artificial Sequence
  Synthetic
ERMKDELKKILDEARRVVERIDREAKRIDDELREVVERISRDAKRSLDELDERTR

SEQ ID NO: 16359 - protein, 56 aa, Artificial Sequence
  Synthetic
DEMREVLRELEDELRKIKERLKRVLDRSRELLEEWREELERVHRRNEETLRRIEKN

SEQ ID NO: 16360 - protein, 55 aa, Artificial Sequence
  Synthetic
EEIKRRAEDILRELRRLVEELERRNEEINRRLAKRIKELMEKIRREDERLKKEVE

SEQ ID NO: 16361 - protein, 60 aa, Artificial Sequence
  Synthetic
DKAKRVRTELERRLEKLKRDARKVIEEHEKSLRDLEEEVRRVREEHERSLKELKEELDRK

SEQ ID NO: 16362 - protein, 55 aa, Artificial Sequence
  Synthetic
EDVTRELERVLDELRREVDRVRRELEKIDRELRELVKRIEDELRKINKELKEKSD

SEQ ID NO: 16363 - protein, 61 aa, Artificial Sequence
  Synthetic
DEVEELVKTVRKLVEDHNRKLEEVVRRLREIVKELEDRTRRALEEARRTVKRIEEEVRKRG

SEQ ID NO: 16364 - protein, 56 aa, Artificial Sequence
  Synthetic
ERLLRELKDLLEKSKRRVDELVKEIEKRNRDHKEKVRKIVDEIRRLLRELEERVKK

SEQ ID NO: 16365 - protein, 58 aa, Artificial Sequence
  Synthetic
KLEEILRRIRELLKRHHEKNKKILDDIREKSKKLKKKVDDILTRITEIIKDLEREVDG

SEQ ID NO: 16366 - protein, 59 aa, Artificial Sequence
  Synthetic
ERVLEDLRRKADDIIRRADEESRKIKEEADDIFRRSDELLKRLEDEAKRIADEVRKKTK

SEQ ID NO: 16367 - protein, 59 aa, Artificial Sequence
  Synthetic
DSDRIEETIKKLLKELSDKSKEVLDEIRKRLKDHHDRNRKVLEEIRRILKRLEEEVRRK

SEQ ID NO: 16368 - protein, 59 aa, Artificial Sequence
  Synthetic
KRALKEMLDRVRKIIKEYEDSLRRLKEEVDEIIERADRLSEELRRKAEKIIRDITDAVR

SEQ ID NO: 16369 - protein, 58 aa, Artificial Sequence
  Synthetic
DSEELLREIRKRLEDLSRKSEEIKRRIDEISRDLERKVEEIKKRIEELVRRVRTEADK

SEQ ID NO: 16370 - protein, 59 aa, Artificial Sequence
  Synthetic
RKVLERIREEADEIDKDYDRLLKEIRKKIEDIARDTERRLRELKDRVDKIIKKVEEDER

SEQ ID NO: 16371 - protein, 57 aa, Artificial Sequence
  Synthetic
REIETVTKKSRDLNREIDKKLKELTERVDKLIEEWKRKTDRVREEAKRAVKEIEDKN

SEQ ID NO: 16372 - protein, 59 aa, Artificial Sequence
  Synthetic
EELRRVIEESKRSNDELKKKADELSKRVKEALDRLEEEDKRVLEEIKDILRELRERRRK

SEQ ID NO: 16373 - protein, 56 aa, Artificial Sequence
  Synthetic
SEIEEVEKKSRELNRRVKERLDEVEEESRRLNEKWERDTRRVRERVEEEIKKIEER

SEQ ID NO: 16374 - protein, 59 aa, Artificial Sequence
  Synthetic
EKLDEVLKRSEDSNRELKRRAEELLRDSERTNEELRRRDEEVKREVEEKLKELEKEIRR

SEQ ID NO: 16375 - protein, 58 aa, Artificial Sequence
  Synthetic
SSKEILKEIDERVEELKRRNEKVDREIKEKVKRLEEENEKVDREIKEILKELEKEAEK

SEQ ID NO: 16376 - protein, 59 aa, Artificial Sequence
  Synthetic
EEVLERLRREVRKRIEDYKRKLDKIARDVDETIERYKRKLEEIKRRVEDEARKIKEEIR

SEQ ID NO: 16377 - protein, 61 aa, Artificial Sequence
  Synthetic
SRKEELKRRLDEALKKYEADLDELRRRHEEDVRRSKEENERLLKELEDAVRRAKEEVKKAG

SEQ ID NO: 16378 - protein, 56 aa, Artificial Sequence
  Synthetic
DRRVEKEIREAIERLKRNLERIKRNIEKVREDSKRVNKELRDKIREIIERIDRRLK

SEQ ID NO: 16379 - protein, 61 aa, Artificial Sequence
  Synthetic
SRKEKLLDDARKILKRAEEELKRLYDKHRRIIEEVKRDLERLKKEHEDVVRRVEDVLRKRV

SEQ ID NO: 16380 - protein, 56 aa, Artificial Sequence
  Synthetic
DKELEEDIRRIEDRLRRLLEELEKLIEDSMRELKRVLDELEKHIREVDEELEEDLK

SEQ ID NO: 16381 - protein, 64 aa, Artificial Sequence
  Synthetic
SEAERVKRELDEALKKAKKALEDNKRKLEEALRKHREDAKRWKEELEKALKEAEKAAKDLRRDA

SEQ ID NO: 16382 - protein, 55 aa, Artificial Sequence
  Synthetic
KEAERKLRELEKRAKEALERSKEHSDELEERARKANKEIEDKLKRLAEEAEKEAR

SEQ ID NO: 16383 - protein, 56 aa, Artificial Sequence
  Synthetic
SEAEKIKKDLDKIREDLKRLDREAEERVRRLSEELDRKDRELRKRIDEILKRMRDE

SEQ ID NO: 16384 - protein, 59 aa, Artificial Sequence
  Synthetic
DEDLKRLEDELRKVEEDNRRTLEELRRRVEEVSRRNKESLEDIRRKLEEAIRRLREKTR

SEQ ID NO: 16385 - protein, 56 aa, Artificial Sequence
  Synthetic
DGAEEVDDRLKKADEELRRKDKESDEKTKRIAEELRKLLEESKKKTEDLVRRLDEE

SEQ ID NO: 16386 - protein, 59 aa, Artificial Sequence
  Synthetic
EKRLRELEKKVEDVSRTNKKTLEDNRKKIAEVVKRLDEEIKRNKDTVRRVVERVKKDTD

SEQ ID NO: 16387 - protein, 60 aa, Artificial Sequence
  Synthetic
ERKERLKERLDEVKKEHERLVERWHRENREVLRENRETVERLERELERVLRELRDALREQ

SEQ ID NO: 16388 - protein, 56 aa, Artificial Sequence
  Synthetic
DEELEKRIEEVERKLRDTNRKIEELLKRLKKRHEEVDRELERLLEKLEREAEETRR

SEQ ID NO: 16389 - protein, 61 aa, Artificial Sequence
  Synthetic
SEEEELEKELEKVLRENEESVRRLHKRNRDVLKKNRETLEKLEEDLKRVLERLKRALDRKN

SEQ ID NO: 16390 - protein, 56 aa, Artificial Sequence
  Synthetic
EKEARDEVRRLKKKMDDVDKDVERLVRELEKEHEEVDKDLRRKLDEVRKELEDARR

SEQ ID NO: 16391 - protein, 57 aa, Artificial Sequence
  Synthetic
SEEERLEKELDEVLEDHKRRVEEWKKKMDEVNKKHKESIDRLREELDRVLDEVRKAG

SEQ ID NO: 16392 - protein, 60 aa, Artificial Sequence
  Synthetic
REEALKRLEELVRKLKEKLERINRRIARIVDKNTKEIKDTNDTLRKEVRDLMKELKDRTR

SEQ ID NO: 16393 - protein, 57 aa, Artificial Sequence
  Synthetic
REDEEVKKELRKILEDHKRRVEDWKRRLKKNLEEHRRRVEEWKRRLDELLEKVRRAG

SEQ ID NO: 16394 - protein, 56 aa, Artificial Sequence
  Synthetic
EEEIKRVIERLARDARRINERLRELLERLSEISERINREIEKIIDEARERLEREER

SEQ ID NO: 16395 - protein, 57 aa, Artificial Sequence
  Synthetic
SEKEEVKKRLKDNMRRAEELIRRDDREVEENRKRHDELVKEWDKRLREILKKAEDSG

SEQ ID NO: 16396 - protein, 56 aa, Artificial Sequence
  Synthetic
EKEIKEVLEELSRTSKRLIEDSKRSSERLSERSKRTNEEIERIVRAAKRTIEERER

SEQ ID NO: 16397 - protein, 60 aa, Artificial Sequence
  Synthetic
SVAEELEERLKEIKRESEKSIRDLRRLLEEIERRLRDINRKLDEIVKRVAEKIKDAETKG

SEQ ID NO: 16398 - protein, 59 aa, Artificial Sequence
  Synthetic
KKVVDDVERKLREIIRRHEEELKKIKEDLDKIREDHERLLREWKKELDELITRVAESAR

SEQ ID NO: 16399 - protein, 60 aa, Artificial Sequence
  Synthetic
SVSKKLDDELRKMEREIEKSNETIKKLIEDIRRRSKESRDRLKELLEEIKKRLKEAEERG

SEQ ID NO: 16400 - protein, 59 aa, Artificial Sequence
  Synthetic
EKVVEDIERRVEKVLTDHERELERVERELDDIIRRHEEELEKIERELEKIKEDVDRSAK

SEQ ID NO: 16401 - protein, 60 aa, Artificial Sequence
  Synthetic
DELDRLRELLEELKRRSETVIKEAEELLRKLERELRELIREWKEITERLARRMEDLSRKG

SEQ ID NO: 16402 - protein, 59 aa, Artificial Sequence
  Synthetic
REDLKRIEEELREILKRHRDANKRIKDEVEELLKRVEEMLRRLHEEDRKLLEDLKRETD

SEQ ID NO: 16403 - protein, 60 aa, Artificial Sequence
  Synthetic
RETEEVKKDVDRIRKASEDVARKMEKITRDVAKELRDLIEEWRRRSEELKKELEDLSRRG

SEQ ID NO: 16404 - protein, 59 aa, Artificial Sequence
  Synthetic
EDELKRIEEELRKILKEHEDKNREIKKENDRLNKEVEEEAEKATREDKRLLEKADRDRQ

SEQ ID NO: 16405 - protein, 57 aa, Artificial Sequence
  Synthetic
SEKEEIEKRLDKLLKEHEEENDKIRRTLKEINDRSKEEVERIEERLKDLLRRLRERI

SEQ ID NO: 16406 - protein, 56 aa, Artificial Sequence
  Synthetic
TKRARDRLEELRRESEELIKTARDLVRRSEKEHRDLIERLRRILEELREKLERKTT

SEQ ID NO: 16407 - protein, 60 aa, Artificial Sequence
  Synthetic
SVKEEVRTLLRRLERVSRELIRRLKEMLKTLHEENKKLIDDSRKLIRKIKRDLERVAERR

SEQ ID NO: 16408 - protein, 59 aa, Artificial Sequence
  Synthetic
KDTVKKVKEDLKDILRRHEEANERIRDELRRNLRKHEDDSKKSKEELDRILKKARDDAR

SEQ ID NO: 16409 - protein, 59 aa, Artificial Sequence
  Synthetic
DIEDELRKELEKHHTKSREVKRRLTELLKRHEDRVEEVERRLRKDLKELRDRIEELSKI

SEQ ID NO: 16410 - protein, 59 aa, Artificial Sequence
  Synthetic
EKVAREVEERLKRDHDDLRRVIEEIRKRLEDSHRELKKTIEDVKRRVEELIEEAERRMK

SEQ ID NO: 16411 - protein, 59 aa, Artificial Sequence
  Synthetic
SIREKLREVLERHHRTSRKVEEDLRRKLEDHHRKTREVAERLKEKVDRLREEIKRASRI

SEQ ID NO: 16412 - protein, 59 aa, Artificial Sequence
  Synthetic
ERVVRKIEKDLRDDHRRLKEIAKRIDDEARRDIKRLEEIIKKIEEEVDRLIEEVRRRDK

SEQ ID NO: 16413 - protein, 60 aa, Artificial Sequence
  Synthetic
DKDREIERLAKEAKDRHDKTLEDDRRRLEEVRRKIEETIRRIKKKLDEAKKRLKELVRDK

SEQ ID NO: 16414 - protein, 55 aa, Artificial Sequence
  Synthetic
EEILKELEEIVRRVEEKNKRLHDENEKDTRRVEAVLEDIKRRIDEIVRRLEERIK

SEQ ID NO: 16415 - protein, 60 aa, Artificial Sequence
  Synthetic
DEKDRIDKRMKEVLKKIEELIRRDERRLEKVRKDHEELVRRIEDELRRVLEELKKLVEEK

SEQ ID NO: 16416 - protein, 55 aa, Artificial Sequence
  Synthetic
EDIERKIRELEEKVERELKKIHDENEKLAEKARRDLERIEREIDKLVKDVEDAIR

SEQ ID NO: 16417 - protein, 60 aa, Artificial Sequence
  Synthetic
SEKDKITKTLEDAKRDHRKLVEEDEKALEEVERRHEEIVRRIEEKLKEAKEELDRLVRDK

SEQ ID NO: 16418 - protein, 55 aa, Artificial Sequence
  Synthetic
EKILREIEERIKEVKENLRRVHEENRELAKKVLKDLERILEEIKKIIKELRERVK

SEQ ID NO: 16419 - protein, 60 aa, Artificial Sequence
  Synthetic
SKKDEIEETIRRARERIKTIVDRIREELKRIRDKHKKLVDEDKKTLEEVLRTLRELVRDK

SEQ ID NO: 16420 - protein, 55 aa, Artificial Sequence
  Synthetic
DEILEKVKELVREVEEVLRRIEKEIEDLVRKVEEDLRRIHERNRELAKKADDDIK

SEQ ID NO: 16421 - protein, 60 aa, Artificial Sequence
  Synthetic
SKEEEIEKTLKKIEEDHRELVRRIERALDDARRRHKELVDRDDKELRDAERELDRLVREK

SEQ ID NO: 16422 - protein, 55 aa, Artificial Sequence
  Synthetic
EEILKEIRDLADEARRNLERILRDIERVVEKVERDLKRIHDKNKRDVERVRREVK

SEQ ID NO: 16423 - protein, 60 aa, Artificial Sequence
  Synthetic
KEKDDIDRDLKRAEEEHKRLVDEIRETLKEIEREHRERVKRIKEKLDEAKRRLEKLKRDR

SEQ ID NO: 16424 - protein, 55 aa, Artificial Sequence
  Synthetic
EKILEDIKREVDRVRKNLKEIKEKIDKEREDVKRDLDRIRKEIEELVEKVDRDVK

SEQ ID NO: 16425 - protein, 60 aa, Artificial Sequence
  Synthetic
DKARKIEEDIRRAEEEHKELVKRNEERIKEVAERHEETVRDIERKAEDIRRELKKLVDEK

SEQ ID NO: 16426 - protein, 55 aa, Artificial Sequence
  Synthetic
KEILDEVKKLVDEVRANLEKSHEDIERLVEKVREDLKRIEERLRKIAEDLRRRVK

SEQ ID NO: 16427 - protein, 60 aa, Artificial Sequence
  Synthetic
EEEREIEDTIRRAEEEHRKRVEDNKRRLEEAEKEHRKRVEDNKRRAEEIRRKLKELVDRK

SEQ ID NO: 16428 - protein, 55 aa, Artificial Sequence
  Synthetic
EEILKKVKELVDRVRRNLERSHEKIKRIEDKVRRDLERSHKELEDLMRRMEEEIR

SEQ ID NO: 16429 - protein, 57 aa, Artificial Sequence
  Synthetic
EKKERIEERAKEVEREHREIVKRDEEELERVREEHEESVRRDRKALEDVERDVRRDG

SEQ ID NO: 16430 - protein, 56 aa, Artificial Sequence
  Synthetic
MEDMLRKVKEVADENRERLKELHEENERTARRLRKLNRELHEENKRLVEEIKKEAK

SEQ ID NO: 16431 - protein, 57 aa, Artificial Sequence
  Synthetic
SKAEEIRKELDRVRREIEKRAEEDKRTLEEVRREHEKLVRENEETIKRVEEDVERAG

SEQ ID NO: 16432 - protein, 56 aa, Artificial Sequence
  Synthetic
MEDALREIKEVADEVRKKLRELHEKNKKLMDDNRRKLDKSHKDVREVEREIRERIK

SEQ ID NO: 16433 - protein, 57 aa, Artificial Sequence
  Synthetic
DKERRIEEELEKARRDHKEDVDRDRERLKEVREEHERLVRENKKRLEEIRKELEDRG

SEQ ID NO: 16434 - protein, 56 aa, Artificial Sequence
  Synthetic
MEDLLREVKRVVEKNKEDLKRLHDENEKLAEENRRRLKKSHDEVEKVAEDLKRKAK

SEQ ID NO: 16435 - protein, 57 aa, Artificial Sequence
  Synthetic
EKKERIEDDLRRVKEEIDDLLRKNEKRLREAEDEHRKRVEDDRRRLDEVRKEVDDEG

SEQ ID NO: 16436 - protein, 56 aa, Artificial Sequence
  Synthetic
MEDALRKLKRVADEIRKRLDESHKEIKKVVDDNRKKLEELHRKNRELERKIREDAR

SEQ ID NO: 16437 - protein, 56 aa, Artificial Sequence
  Synthetic
KDEERIKKKLKKLVDENRDLNRRIEETNRRVAEDLDRRLKEIEKRNRDMAEELRKS

SEQ ID NO: 16438 - protein, 55 aa, Artificial Sequence
  Synthetic
DEIRKRAEDAERETRETNRRIRDHTRRVAERVEKVLDEIRRHTEEVKKEVDEKER

SEQ ID NO: 16439 - protein, 56 aa, Artificial Sequence
  Synthetic
SDEERIKDKLEKLVKENEDKNRRILEENKRVADENRRLNEEIEKRLEEMVEELERR

SEQ ID NO: 16440 - protein, 55 aa, Artificial Sequence
  Synthetic
EEIRKRVKEAEDKTEETNRRIEKHHREVKKESEESNKRITDRLEEVKERVTRKRK

SEQ ID NO: 16441 - protein, 56 aa, Artificial Sequence
  Synthetic
KREEDIKRRLEKLAKENRERNEEIKRRLDELVDRNREENEKILRELEKMVRELERS

SEQ ID NO: 16442 - protein, 55 aa, Artificial Sequence
  Synthetic
EEARKRLEELKKETEDTNRRIDEAVERAKEETRRTNERIKEELKRVKKKVTDKRR

SEQ ID NO: 16443 - protein, 60 aa, Artificial Sequence
  Synthetic
SEVETAKEDLKKKVEENEKRIKDVEDKLRKTVEDNRKRLEDVLEELRRSVETLRDLLRKG

SEQ ID NO: 16444 - protein, 55 aa, Artificial Sequence
  Synthetic
EELEKRLREAEEKSDRLLRRLKEESRKAEEDSKRLLKELKEESRRAEEEVRRARD

SEQ ID NO: 16445 - protein, 60 aa, Artificial Sequence
  Synthetic
DEKEEAKERLKELRRRLEETDKRVDEELEKLMREMEDTDRRVKEKVDRSRREADEVLRRG

SEQ ID NO: 16446 - protein, 55 aa, Artificial Sequence
  Synthetic
EELKRRLRKVSEENKESNERLRRKVKRVVDENRRTNKELKETSKKVKEDIERKRK

SEQ ID NO: 16447 - protein, 60 aa, Artificial Sequence
  Synthetic
SELEEVTDRLRKLAEKARRLDKEYEEKSRKLKEEVERIDEDLDRLLKELTDEVREIAERG

SEQ ID NO: 16448 - protein, 59 aa, Artificial Sequence
  Synthetic
EEALRRIEKEIREVEKENRDTLERLRRHDEEVNRTNKETLDRLDEKLKRVEREIDERRK

SEQ ID NO: 16449 - protein, 61 aa, Artificial Sequence
  Synthetic
DEEEDLKEKVKKVETEHEETLKEIRRKLEDVKREHEKTVEEIRDHNRKVEERIRDVERRKD

SEQ ID NO: 16450 - protein, 55 aa, Artificial Sequence
  Synthetic
ERIRERLEELMRDARRLNRELDEKVRKLVEKARRDNTRVKKKSRELMKEIDDELR

SEQ ID NO: 16451 - protein, 61 aa, Artificial Sequence
  Synthetic
DEEEELKERIERVKDENRRSVERLRRELKRVEDDHRETVKDLERRLREVKKEIEELVRRKD

SEQ ID NO: 16452 - protein, 55 aa, Artificial Sequence
  Synthetic
EELKKKLEELMKEVRDLDRELKREVEELEREIRRLNKEIRERIEDLVRKAREAIR

SEQ ID NO: 16453 - protein, 61 aa, Artificial Sequence
  Synthetic
REEEELKKKLDDVRRENEESVKKIKEDIDRVRREHEKTVEEIRRHNKKVEEEIRAEVRRKD

SEQ ID NO: 16454 - protein, 55 aa, Artificial Sequence
  Synthetic
DRIREEIEKLAEEIRRLDERLEEELREIVRKMRELNRRVAEKSKELTEDARRRLK

SEQ ID NO: 16455 - protein, 60 aa, Artificial Sequence
  Synthetic
SEREEIRERLRRNLEELRKSIKKIEDDLRRLEKRHRDAVKEIEDRLRRLEEKLDEMAKRD

SEQ ID NO: 16456 - protein, 56 aa, Artificial Sequence
  Synthetic
REDVKRAVDEIHKHTKEKEDRLRKLLKDLEKNIEDAIRRLEKLLRDLEEEIKEAAK

SEQ ID NO: 16457 - protein, 59 aa, Artificial Sequence
  Synthetic
EESERILEKIRRAAEEDKERIRKAIEELRKLAEEDERKLRKANKEARDSARELRRLLKE

SEQ ID NO: 16458 - protein, 58 aa, Artificial Sequence
  Synthetic
EVVEEARRLIKKWREEVERLNEEIKKLVEDWDRRVKELNERHRDDDRKIEKEVEDEEK

SEQ ID NO: 16459 - protein, 60 aa, Artificial Sequence
  Synthetic
SELEKALEEIKRLAEDDMRRIKKVIKELEKLARDDEKRLREVIERLETEVRKLEELLKRG

SEQ ID NO: 16460 - protein, 58 aa, Artificial Sequence
  Synthetic
EVVDELRKRLKEVKERAEDLNRKLEELIRRWKERVERLNRELEKRMRDVEEKVRREEK

SEQ ID NO: 16461 - protein, 60 aa, Artificial Sequence
  Synthetic
SDLEKILEELKRLAEEDKRKLEEVIKKLEEAARKDAEDLKKVNEEAKKSARELEELLKRG

SEQ ID NO: 16462 - protein, 58 aa, Artificial Sequence
  Synthetic
EVVREIEELLKKIEEEVRRLNEELKRLADEWRREVRRLNEEHKDTDRRIKERVKRAEE

SEQ ID NO: 16463 - protein, 60 aa, Artificial Sequence
  Synthetic
KDMERMLKEIEDLARKLREELKRVLDELRKTAKRDEEELKKVNKEAKESARELEEKLRRG

SEQ ID NO: 16464 - protein, 58 aa, Artificial Sequence
  Synthetic
EVVKELRKLLKKIKDDVRRLDKELDELLRRWEESVERLNREHKKTDEKVEEDVKRTTT

SEQ ID NO: 16465 - protein, 61 aa, Artificial Sequence
  Synthetic
SEEEKVEKELRDLVREDDRRLREVEERVRKVVKEAEDDHRRVKEDIRRMVEEIRKKLDKDG

SEQ ID NO: 16466 - protein, 55 aa, Artificial Sequence
  Synthetic
ERLEDEVRKVEDRSRRMNERIDERLKRVEEESKKAIEELRRELERVKREVEERKR

SEQ ID NO: 16467 - protein, 61 aa, Artificial Sequence
  Synthetic
SEVEEVKKELEKLAREDEKRLEDVKEEVKESARRDKRRLEEVEEDLDRLVKELEDKLRDDG

SEQ ID NO: 16468 - protein, 55 aa, Artificial Sequence
  Synthetic
DELKRKLKRVEERSREVNRELRERDKKIEEDSRRINKRLKKKVDEVKEKVREDTR

SEQ ID NO: 16469 - protein, 61 aa, Artificial Sequence
  Synthetic
DEEEDVRRKLEELARRLKRRLEEIEKRLRDSVKEDRRKLEEVKEKLRELIKKLEDEIRKKG

SEQ ID NO: 16470 - protein, 55 aa, Artificial Sequence
  Synthetic
EKLKEDVERVKRDVRRVIRELEKTDERIERESRKVNEELKELVERVERSVKKADE

SEQ ID NO: 16471 - protein, 60 aa, Artificial Sequence
  Synthetic
DEDREARKKVEALLKEVEDRVRESKKRTKDLLREIEKRLRDTTREIDELRRRIEDLSRRG

SEQ ID NO: 16472 - protein, 59 aa, Artificial Sequence
  Synthetic
EEVLRELKELLDKIRETIERASKENEELLREIEKRIEDANRENTERLRRIEKRIDDDAR

SEQ ID NO: 16473 - protein, 56 aa, Artificial Sequence
  Synthetic
SEKDELRKRVEDIKETAKKVVEELREASRKIHEDNKRVNDRLRKESKRIKDKADKL

SEQ ID NO: 16474 - protein, 55 aa, Artificial Sequence
  Synthetic
ERAREEVRRIEKTIRDTARRVRERVRDSERRFRKLVREWEKLVEDSERKIDELSK

SEQ ID NO: 16475 - protein, 56 aa, Artificial Sequence
  Synthetic
SAKEEIKERVKRIEERLRRLLKELEEKVKRIHDENRKVNKELTDRSKEIKDRLKDL

SEQ ID NO: 16476 - protein, 55 aa, Artificial Sequence
  Synthetic
EEVREELKRIEERLDRTLREVRKTLEDIERRIRKAVEDWRRLVKESEERVKRLTD

SEQ ID NO: 16477 - protein, 60 aa, Artificial Sequence
  Synthetic
SEEERVRKDLKELHEHLKREVDKARKDLEDMHRHSEELAREVRERHERSKRELDELERRG

SEQ ID NO: 16478 - protein, 55 aa, Artificial Sequence
  Synthetic
EEIEERVRRNEDTLRRVLKELRERAKRNKDDIRRVLKELEDRSREIEKKLREAER

SEQ ID NO: 16479 - protein, 60 aa, Artificial Sequence
  Synthetic
TEEERARETLDRLNKHSKELVDRVREKLKRLVEHSRELLRRVDRKHKESEKRVREVSRRG

SEQ ID NO: 16480 - protein, 55 aa, Artificial Sequence
  Synthetic
DEIERRVERNKREIDKVLKELEERVRTNKDEIDKALEKLKRLSEEIKRKMREDET

SEQ ID NO: 16481 - protein, 60 aa, Artificial Sequence
  Synthetic
KEKEELDETIRRLEEHSKKKVDKVRKELKEMDEHSRDEARRVRREHEKSEEKVRRASEEG

SEQ ID NO: 16482 - protein, 55 aa, Artificial Sequence
  Synthetic
EEARERLRKNEEEIKKVLEELERRVRENKERIDDVERELEDLSRKIEEKLDRDDT

SEQ ID NO: 16483 - protein, 60 aa, Artificial Sequence
  Synthetic
KEEEEARRTLERIERRIRKALKEIDETLKRLNDHSAKRVKEVREKHEESRRKVDDVSRRG

SEQ ID NO: 16484 - protein, 55 aa, Artificial Sequence
  Synthetic
EEIRERVKRIKEEMDRALKRLKDKVKENKERIDEVLKDLRRTSKEIKERLDRSTK

SEQ ID NO: 16485 - protein, 56 aa, Artificial Sequence
  Synthetic
SKKEELERLLEEAKKKHEESERRLRESSKKLEEEIRRMKEHSKKSSEDAEDKLRRN

SEQ ID NO: 16486 - protein, 54 aa, Artificial Sequence
  Synthetic
ELLERIKDLVRRSEEENKKLLDEHRKIVKTLKERLEKLNEEHERIVREVERRTR

SEQ ID NO: 16487 - protein, 56 aa, Artificial Sequence
  Synthetic
SSEDELRRLLKEARDTHRESEKRLRDSSKRAEDMHEKSKEDVERSSRELEKELRRR

SEQ ID NO: 16488 - protein, 55 aa, Artificial Sequence
  Synthetic
ERLLDEVRKEMKRSEEENRRLLREHEEVVKKSIKENKELLDKHKEIEDRLREEIR

SEQ ID NO: 16489 - protein, 56 aa, Artificial Sequence
  Synthetic
SEKETLKRLLDEIKKRHKESEDRVRKLVEDAREELDRVADELRKSSEDLRRDLKRA

SEQ ID NO: 16490 - protein, 55 aa, Artificial Sequence
  Synthetic
SKLLREVEKLMEESRKRNEDLLKELRDIIEDLREKLRELLREHREAAKRLRDEIR

SEQ ID NO: 16491 - protein, 57 aa, Artificial Sequence
  Synthetic
DERETLEKLLKEVRDMHEESKKRLTDSSRKLREDLRRVKEELDKTLRDIEERAKEEN

SEQ ID NO: 16492 - protein, 55 aa, Artificial Sequence
  Synthetic
SRLLEEAKKLIEESKRENEELLKEHDKIVKELIKKLRDLLKEVEDRARDVTEEAK

SEQ ID NO: 16493 - protein, 56 aa, Artificial Sequence
  Synthetic
SSRETLDELLRRAEEIHRRSEEELRRSSEEVRRKHEKSERDLEKLLRDAEELLRRE

SEQ ID NO: 16494 - protein, 55 aa, Artificial Sequence
  Synthetic
DKLLDTVRKLVETSRDENRKLLEDHKKMVKESEDRNRELLRDLERVIEELSRRIR

SEQ ID NO: 16495 - protein, 56 aa, Artificial Sequence
  Synthetic
SEVEEILDRLRREVERSKKKVEDILRELKKLAEDTKEKVERVLDRNRKTIEELKKA

SEQ ID NO: 16496 - protein, 59 aa, Artificial Sequence
  Synthetic
EDLVTKLRDLLRRHHETLRRLAKELRDLLKKHHEELRRLIERLEKSLEDLERELDKTRR

SEQ ID NO: 16497 - protein, 57 aa, Artificial Sequence
  Synthetic
SEVEKILEDLKKLIKESKDEADRILTDHRRLVKETEEEARRALERNRKTVDDLRKAN

SEQ ID NO: 16498 - protein, 59 aa, Artificial Sequence
  Synthetic
EEALRELRRLLKEHHEILRKVEEELRRSDEEHHRRLEEVERRLRKSLRELEETVRETTR

SEQ ID NO: 16499 - protein, 57 aa, Artificial Sequence
  Synthetic
SEAERILEKLDRLVKETDRRVKEVLEDNRRTVRRLEEEVKRILKENRETARELEEAN

SEQ ID NO: 16500 - protein, 59 aa, Artificial Sequence
  Synthetic
EEVLRRLKKLLDEHNERLRRLERDLDRSLKEAKETLDELERRLEKSLRELKESVDRTRK

SEQ ID NO: 16501 - protein, 60 aa, Artificial Sequence
  Synthetic
SSEERLKEEFKRAAEKVRKVEEELRELHERVEKSSRDSKRRIRELLKRAEEEVKRVEDRG

SEQ ID NO: 16502 - protein, 55 aa, Artificial Sequence
  Synthetic
DEVLRDLKRLIEELEDKARRVLDKSRRIIERLRRKDEEVLRKLEKEIRELKKKAN

SEQ ID NO: 16503 - protein, 60 aa, Artificial Sequence
  Synthetic
DEERELRRLLEDVKRRVREVEEELRRLHEEIKRTSKRSKEELRKLHKELEDAVREMAKRG

SEQ ID NO: 16504 - protein, 55 aa, Artificial Sequence
  Synthetic
DKVLRDLEELVKELKRRLDEVLETSRREAEKLKRDDEKVLRESKKIMEDLRRRAE

SEQ ID NO: 16505 - protein, 60 aa, Artificial Sequence
  Synthetic
SEEDELRKLLEELRRRSKEVNDRLRKLHDELRRRVEDLKRKLRELHKEAAKIVEEMKARG

SEQ ID NO: 16506 - protein, 55 aa, Artificial Sequence
  Synthetic
DKVLEDLRRLVEENTRRLEEMLKRSEKIARDLLEDVKRFLDESKKKIDTLRRRAE

SEQ ID NO: 16507 - protein, 60 aa, Artificial Sequence
  Synthetic
SLEDELRRLLTEAEKRSKDVNERLRDLHREVRELSEDVNRKLEELHRELEERVKELKREG

SEQ ID NO: 16508 - protein, 55 aa, Artificial Sequence
  Synthetic
DEVLKKLKELVRRNEEELEKALKESKDIVEKNKRDLDEVEKKSREIVRELIERTK

SEQ ID NO: 16509 - protein, 60 aa, Artificial Sequence
  Synthetic
SLEETLEKLLREAEDISRKANKRLEEAHERIKRTLEDLERKLEKLNKEVRDRVERVKERG

SEQ ID NO: 16510 - protein, 55 aa, Artificial Sequence
  Synthetic
DKVLEKLKRLIEENKKRLERVLEKSDKILDDLRRKVEEVLKRLEKTVKDLEDEAR

SEQ ID NO: 16511 - protein, 61 aa, Artificial Sequence
  Synthetic
SEDEELLRRLEETIRRATERVKRLLDTLRKLAEDVRKELERLLDTHRELAKRIEDELREGR

SEQ ID NO: 16512 - protein, 55 aa, Artificial Sequence
  Synthetic
EEVERVLREVTKRLRDLKREHRKLLEKVKRELEKVEEDHRDSSRKLEEIIKEAEK

SEQ ID NO: 16513 - protein, 61 aa, Artificial Sequence
  Synthetic
SEAEKLAKDIREAAKRLREHAERDKEELKKAADKLRDEARRDAEKLKRAAEKLKDLARRTG

SEQ ID NO: 16514 - protein, 59 aa, Artificial Sequence
  Synthetic
EEAAKRIKELLDKARKDLEDAKREAEELNRRAREELEKAKKDAEDLNRRAKEELDKARK

SEQ ID NO: 16515 - protein, 60 aa, Artificial Sequence
  Synthetic
DDKDKLLEELRKVIEELEKKLEDNNRELEKVLEKLKREAERDLERLREMIRRLEELLRRD

SEQ ID NO: 16516 - protein, 59 aa, Artificial Sequence
  Synthetic
EEVLDRLRRIIEELRERLKRAEKSNRDILERIDRELEKLKRRAEELNEELRRRLKERRD

SEQ ID NO: 16517 - protein, 61 aa, Artificial Sequence
  Synthetic
SRTEEVLKELRTLMRELRRRLEEVIKELEKSAEELERIAREVAKRSRKVIEELKRKADKDG

SEQ ID NO: 16518 - protein, 55 aa, Artificial Sequence
  Synthetic
EELEDLLRRIRETLEDMKRRLDELDTELEKRLREVARTLDELHKELEETLRRLKK

SEQ ID NO: 16519 - protein, 57 aa, Artificial Sequence
  Synthetic
DAEDELRELSKRNKDEVREVKERLKKLSEENRRDLERVKRKLEKDSEENREALEREN

SEQ ID NO: 16520 - protein, 55 aa, Artificial Sequence
  Synthetic
EELKKRIEELIRRSRKLAEDLKKKLEDIHRETERLVRELAELVRDLHRRTKEKAR

SEQ ID NO: 16521 - protein, 57 aa, Artificial Sequence
  Synthetic
SAEDRLRELSKRNREEVEEVEKRLRELMERIRRRLREVKEDLRRLSEENRKTLERKN

SEQ ID NO: 16522 - protein, 55 aa, Artificial Sequence
  Synthetic
EEIEERIKRLIKESRDLARELEEKLRKLLEELEKLAKRLREKVKELHDDTERAAK

SEQ ID NO: 16523 - protein, 58 aa, Artificial Sequence
  Synthetic
SEEDELRELSRRNEEEVKKAKRDLEKLSRENEEDLKRVKRKLEKKSEDNRRILERDNR

SEQ ID NO: 16524 - protein, 55 aa, Artificial Sequence
  Synthetic
EEVKKKIEDLIRRSRELVERLKRKVEELHKTTKRLVEELEKTIDRIIEETRERAR

SEQ ID NO: 16525 - protein, 60 aa, Artificial Sequence
  Synthetic
SAEDELRRLLRENRERNKKADKDIKKLLDDNRRDLERLRRELERILREIEKRLKDVEKDV

SEQ ID NO: 16526 - protein, 59 aa, Artificial Sequence
  Synthetic
EDVVRELMKKVDDDHKESEKLVRESEEKLERDNERTRRIADKLRKELDDTREEIERDAK

SEQ ID NO: 16527 - protein, 56 aa, Artificial Sequence
  Synthetic
DSEERAEDVARENKEILERVDEKARKLLDDNRKVVEELKKTNEESSRELKRVLDEL

SEQ ID NO: 16528 - protein, 59 aa, Artificial Sequence
  Synthetic
EETVEELLKKMRAISRDSERKVKELLDKIRELSDRSRRRAEELNKEHKKIVDDIAERRR

SEQ ID NO: 16529 - protein, 57 aa, Artificial Sequence
  Synthetic
SVEERLRELVKENRDVVRRAEEEFRRLVEENKRILEEIDRRARESSRKLKDVLDKLN

SEQ ID NO: 16530 - protein, 59 aa, Artificial Sequence
  Synthetic
EETMERLLRKAKEISRRSKERLKRLLDKVKKLSEDSERELKKLLDEHEKIVEDIEREAR

SEQ ID NO: 16531 - protein, 56 aa, Artificial Sequence
  Synthetic
DDERRLREVSDRNRRILDRIKKEVERLLDEVRKILKEAEDRLRRSSERLEELLRKD

SEQ ID NO: 16532 - protein, 59 aa, Artificial Sequence
  Synthetic
EREVKKTLDEMRRRSRESEEELKKLLKEIKEIVEELKRKLDTLLKEHKEIVEEIKRRTT

SEQ ID NO: 16533 - protein, 56 aa, Artificial Sequence
  Synthetic
SDEERVRRLEEEVDKTLEKVERELRKVSEENKRTLDRLRAEMEKSSKELERVLEEL

SEQ ID NO: 16534 - protein, 59 aa, Artificial Sequence
  Synthetic
ERDVERTLRKIEETVKKLAEDLKRLLDEIKKISEESKRRAEELLRKHKKIVDDIDKRTR

SEQ ID NO: 16535 - protein, 60 aa, Artificial Sequence
  Synthetic
SMKEELDRLLKELRERNKEIEDRAEELLRRSTDSLRKVKEKLDKLLEESTRILRKVEKEN

SEQ ID NO: 16536 - protein, 55 aa, Artificial Sequence
  Synthetic
EKVLKDIKRVIDEDEERLKRVLDDYERRVRELEDKVKKILDRYKTEVDKLRERAR

SEQ ID NO: 16537 - protein, 60 aa, Artificial Sequence
  Synthetic
SVEEEIRDLLRKLREIVDRVRRRLKEILEESTRRLEEVTRRIDESNEDLKRAVDDVKRRN

SEQ ID NO: 16538 - protein, 55 aa, Artificial Sequence
  Synthetic
KEVLRKLEEEIEKLRKEAKKILDEYRKLVEDLADKIKKILDRNRKLIEELVREVK

SEQ ID NO: 16539 - protein, 60 aa, Artificial Sequence
  Synthetic
SESEKTLKDLDEISKRYEKKVREMLERHKRLSEETKKRDDEALERLTRLVKELKDVARRG

SEQ ID NO: 16540 - protein, 59 aa, Artificial Sequence
  Synthetic
EDVKRRLDELLERHKRISEEVEKRNEDLLREHEEISRRSKKRIDDLLREAERILDEMRR

SEQ ID NO: 16541 - protein, 60 aa, Artificial Sequence
  Synthetic
SESEKVLRDLEKISEDTARRLEDELRKHKEIVDRIKEEDDEMLDRLRKLVETLKRLAERG

SEQ ID NO: 16542 - protein, 59 aa, Artificial Sequence
  Synthetic
EEVKRRLEELLKRHKEESDRARERNERLLKEVRDLSEESRERIERLLRELEERVREDER

SEQ ID NO: 16543 - protein, 60 aa, Artificial Sequence
  Synthetic
SRSEKSLKELREISERTRKRLEDKLDRHEKESKKVEDKAREVLKELEDLVRTLEEVARRG

SEQ ID NO: 16544 - protein, 59 aa, Artificial Sequence
  Synthetic
EEVRRRLRELLERHKRISDEARKRNEDLLREHEKRSRDIEKRLDDLLKEAEDRLRERKR

SEQ ID NO: 16545 - protein, 59 aa, Artificial Sequence
  Synthetic
SDEEELRRLIEEHEKILKEIEDRVRESSKRNKEILKRLEDEVRKLLETVKDRLEKARER

SEQ ID NO: 16546 - protein, 59 aa, Artificial Sequence
  Synthetic
SETAKRVLDELKERSERSMEDLKRLLKEHKERVDEMRRRAEELLKRLREVIRKVEEEIR

SEQ ID NO: 16547 - protein, 56 aa, Artificial Sequence
  Synthetic
SRDEEVKRLKKEHEDILEEIRKRVDESSKRNEKILREIKERVKRSSDDLKRLLEEL

SEQ ID NO: 16548 - protein, 59 aa, Artificial Sequence
  Synthetic
EEDVERVLREFEEVSRRSEETLRRLLEKHKELVERAARELETLLKEHRERVRKIEEEAK

SEQ ID NO: 16549 - protein, 60 aa, Artificial Sequence
  Synthetic
SSKERLEKLLRELEEDLRRAHEEHKRLIKRLREILDEIRKRVEKLNRDLDRVLERAREEG

SEQ ID NO: 16550 - protein, 55 aa, Artificial Sequence
  Synthetic
EELLKEVKEMIKRLRKKIKKSLDDVRRVIRELEEHARRDLRKLEKDLKDIEDKLR

SEQ ID NO: 16551 - protein, 60 aa, Artificial Sequence
  Synthetic
DSEERLKELERRLRELLKRVSERSKKLNKEHEEINRKAEEEVERLNRELERDLEDAARKG

SEQ ID NO: 16552 - protein, 55 aa, Artificial Sequence
  Synthetic
DELLREAEKMLKELEELVREDEKRLKDISKEVEEHYRKDLEDVKRAIKEIRDRLK

SEQ ID NO: 16553 - protein, 60 aa, Artificial Sequence
  Synthetic
DSERRLEKLLRELKELLKRVEESLRRLNEEHKRINDEARERSKRLNEELEETLRKAREDG

SEQ ID NO: 16554 - protein, 55 aa, Artificial Sequence
  Synthetic
EELLKEIKDRLKELAEHVERDERRLKRISEEAEKRYREDVREVKEMIEEIERELR

SEQ ID NO: 16555 - protein, 60 aa, Artificial Sequence
  Synthetic
ESEERLRDLIRKIRELLEEIERRLRDLNRRLREILKRIEEESEKLNRELKKILDEARERG

SEQ ID NO: 16556 - protein, 55 aa, Artificial Sequence
  Synthetic
EELLKEVRERLRELEEHARRDLETLKRMIRKLEEEAKKDLRELEKMIKDIRDKLK

SEQ ID NO: 16557 - protein, 60 aa, Artificial Sequence
  Synthetic
SLEEALRKLEEELERLNEEAKRRIDRLIEELRRLNEEARKKIERLIEETRELLKRLAEEG

SEQ ID NO: 16558 - protein, 55 aa, Artificial Sequence
  Synthetic
REILERAKELLKKLEREYRELLKKIEKVVRDLEEKYRELLKRHRKETERLDREVR

SEQ ID NO: 16559 - protein, 60 aa, Artificial Sequence
  Synthetic
ELAERVKRLIEEHRKTDKEVEDRIRKLIEDHDRENRKVEDEIRKLIKELREIVDRARKEG

SEQ ID NO: 16560 - protein, 55 aa, Artificial Sequence
  Synthetic
EEILDKIREVHRRVRKKARDLAERIKDAHRKLRKKVEELLRRIKEMIRRLEEELR

SEQ ID NO: 16561 - protein, 60 aa, Artificial Sequence
  Synthetic
SDRERLTRLIEELRKLLEKWEREVKKINDEIRRTVEKVEEDSKKSIEDLRRLLKEMEDRG

SEQ ID NO: 16562 - protein, 56 aa, Artificial Sequence
  Synthetic
TKDLERRIEDVIRRLKKLADDDLRDLRRFLKELKERADKLRKEDEEALKELRDRAE

SEQ ID NO: 16563 - protein, 60 aa, Artificial Sequence
  Synthetic
SREDDIRRLIEEARKLVEDAERRSKKSIDDIRRLVKEWEEEVKRINDDLKRLIDEARKRG

SEQ ID NO: 16564 - protein, 56 aa, Artificial Sequence
  Synthetic
DKDLKERIKKLLDELRRLVEELEKRDKEMLDRIKKLADDDRRELERILKKLEDDLR

SEQ ID NO: 16565 - protein, 60 aa, Artificial Sequence
  Synthetic
SAEDTIRTLLERHDDLDREVEERSKESIRELRRLIKEWRERVRKLNEELKRLLDDLRRKG

SEQ ID NO: 16566 - protein, 56 aa, Artificial Sequence
  Synthetic
KEELIEEIKEMNKKAKKSVDELEKKDRDVLDEIRKMAKEDLDRLRKALEDLERDAR

SEQ ID NO: 16567 - protein, 60 aa, Artificial Sequence
  Synthetic
SSEDRVRDIERRHKEEDDRVEEESRRSTREIRELLRTAKERSDDSIRKLRKLIDDLRKEG

SEQ ID NO: 16568 - protein, 56 aa, Artificial Sequence
  Synthetic
TEELEKELEDVNRDVDRSAKRLKERDEEALKTLEDEIRKLEEKDKKVLEDLEREAR

SEQ ID NO: 16569 - protein, 57 aa, Artificial Sequence
  Synthetic
SDKEEVDKLKERNERVLEEVRRRLEKLEKDNKDTLKKIRDDSERLREKIKRVRDREQ

SEQ ID NO: 16570 - protein, 59 aa, Artificial Sequence
  Synthetic
REFVEKALREYEELLKRSRETLEELLRRYKKLLDESRKTAKEDLDRSEEIIKKLADESK

SEQ ID NO: 16571 - protein, 57 aa, Artificial Sequence
  Synthetic
SDEEEVKKLHDENKKVNDEMREESKKLHDENDRVNKEVKERAKKVSKELEDMLRREQ

SEQ ID NO: 16572 - protein, 59 aa, Artificial Sequence
  Synthetic
EETVRRLLEKVREEIRRSKKRADDDLKTTKELIEKSEREVDRLLEEIKKIIEELERRAR

SEQ ID NO: 16573 - protein, 56 aa, Artificial Sequence
  Synthetic
SELEKVLREVEENLREVKRENEEKLRRNEENIKRLEEEDRRRLEEIEKMIEEIERA

SEQ ID NO: 16574 - protein, 58 aa, Artificial Sequence
  Synthetic
EVEEELRRLREEYEEVSRRSKEELEKSLRRLEEVHKESRKRLRDLLKKLDDVAREERK

SEQ ID NO: 16575 - protein, 56 aa, Artificial Sequence
  Synthetic
DELRELLKDIKRTTEDVEREVEEILRKVEEMIRRLEEEDRKVLEDIRRKIEDIRRA

SEQ ID NO: 16576 - protein, 58 aa, Artificial Sequence
  Synthetic
EVRKEMERLRREHEDVDKKVRDELRKLEEELRRVHRESEKALRDLLRKLREVAEREKT

SEQ ID NO: 16577 - protein, 56 aa, Artificial Sequence
  Synthetic
DELEDFLRKVERVIKELRDDDKRALDRIREVTKDVERKAREILKRVEEVIRRIEES

SEQ ID NO: 16578 - protein, 58 aa, Artificial Sequence
  Synthetic
EAEEALERLKTRLEKVHRDSKRALEKLRRDHEEVDKRITEELRKLMERLKRVVDELRR

SEQ ID NO: 16579 - protein, 59 aa, Artificial Sequence
  Synthetic
SADEALRELEERNRKVNEDVKREDERLHREDREVNKRIREEDKKLHKTLRDVLEELRKK

SEQ ID NO: 16580 - protein, 59 aa, Artificial Sequence
  Synthetic
ERRVEKLLRRYKKVLDEVKRELKESLDKAERVTRKSEDDARRSLEEIKKEIEEVRERIR

SEQ ID NO: 16581 - protein, 59 aa, Artificial Sequence
  Synthetic
RVDEELRKLVEDNKRKNEEVKKELKKLKEENERVNKEVRERDRKLHEKLRRVLEEVRRT

SEQ ID NO: 16582 - protein, 59 aa, Artificial Sequence
  Synthetic
EEEMRRLLEEYEELVRRVLKRLKEILEEYERLVRRVEEEVKKSLEDIERKIKEAKDRVD

SEQ ID NO: 16583 - protein, 59 aa, Artificial Sequence
  Synthetic
DVEEEVKKLKDKNRRINEEVKKRMRELEERNKELNKRIREEDERLHRELRKVLEEARKT

SEQ ID NO: 16584 - protein, 59 aa, Artificial Sequence
  Synthetic
REEVEKLLREYEERLERVRKRVEEILAKYKELLDRVEERARKSLKEIKETIEDARRRIK

SEQ ID NO: 16585 - protein, 59 aa, Artificial Sequence
  Synthetic
SMDEELDKLTRENEAVNERVEREARRLKEENRKVDEEVRRAVEELKERVRRVLEEVRRK

SEQ ID NO: 16586 - protein, 59 aa, Artificial Sequence
  Synthetic
EEDVRRLLEEYARLVREAEREVREILRKYEELVRKARKDAKKLLDDIERKIEKIKRDVD

SEQ ID NO: 16587 - protein, 59 aa, Artificial Sequence
  Synthetic
SMDEELKKLVKENEDLNRRVREEAERLRKENEKVDEDAEREDKRLHDKAERVLRELRRR

SEQ ID NO: 16588 - protein, 59 aa, Artificial Sequence
  Synthetic
ERTVTELLKEYRELVRRVEERVKKILKEYKEEVEEVKRRLEESLKDIERKIDEIRRRAT

SEQ ID NO: 16589 - protein, 59 aa, Artificial Sequence
  Synthetic
SMDEALEELTRRNEEVNKRIEEEDRKLHKRNKEVDDEVRKRDKDLHDELRRVLEDARRT

SEQ ID NO: 16590 - protein, 59 aa, Artificial Sequence
  Synthetic
EDEVEKLLREYKRRVEEVKKRAEDSLKRYEEEVKELEDEVRESLERIRRDIEDVKRRID

SEQ ID NO: 16591 - protein, 59 aa, Artificial Sequence
  Synthetic
SMDEAVEKLKKENKDIDEEVRRRLDELRKRNEEVNKKIKEDDDRLHKEAKEVLEDVRKT

SEQ ID NO: 16592 - protein, 59 aa, Artificial Sequence
  Synthetic
EDIVRKLLREYEKLLREVRERARRILEEYKRLVKEVRERAERSLEELKREIKKVRDRAK

SEQ ID NO: 16593 - protein, 60 aa, Artificial Sequence
  Synthetic
SEKEELLRKAKEVIDRIRKELEELLRRAREVNKDSRRTVEEVLRKAREVSERVRKASERG

SEQ ID NO: 16594 - protein, 55 aa, Artificial Sequence
  Synthetic
EELDDLRRRAEELLKRAEDEIRKLHEENKRSNEEAERAIRELAKRNKELDDKTRE

SEQ ID NO: 16595 - protein, 60 aa, Artificial Sequence
  Synthetic
KEKEDLIEKMKKVLEDIRKRLEELLKRARKVNEDSRKLVKEVLDKIKKVNEDVRKVATES

SEQ ID NO: 16596 - protein, 55 aa, Artificial Sequence
  Synthetic
EELTRLAREIEKLLEEARRRVEKLHEENKRSNEEAKERMERLRDHNRKLDDDTRK

SEQ ID NO: 16597 - protein, 60 aa, Artificial Sequence
  Synthetic
REREELIKKVRTVHKRSEEELRRHSEEVKKVNRDSRERVKEHLKRVKEVIKELEDVARES

SEQ ID NO: 16598 - protein, 55 aa, Artificial Sequence
  Synthetic
RELKELADRNKKLLEDIEREHKKLHEDNRRSNEDARRRHEELKREVEKLLDELRK

SEQ ID NO: 16599 - protein, 60 aa, Artificial Sequence
  Synthetic
SLEEEIKRLVKHHEELLREVRKRLKELEDHHRELDERHRRMLEELVREARKLIKDVKDDI

SEQ ID NO: 16600 - protein, 59 aa, Artificial Sequence
  Synthetic
EETVERILRTLKTTDERTTDTVREILRKIKRTNEESKETADRTVKRAKDLIREIRERVR

SEQ ID NO: 16601 - protein, 60 aa, Artificial Sequence
  Synthetic
SAREAIKEIKKHHKKLLEDVKETIDRIEEHHRKLDKDHRDELKKLLEEVRELLRDIRSRI

SEQ ID NO: 16602 - protein, 59 aa, Artificial Sequence
  Synthetic
ERTVEKILEELKDMNRATKRRVEEILRRLKKTNDESEKRARDTLTRIKELIEEVERRAR

SEQ ID NO: 16603 - protein, 58 aa, Artificial Sequence
  Synthetic
DESEELKKEAKEILDRLEKVLRELTDRNREMLKRIEKLIRENEKRLEDILREIAKRAS

SEQ ID NO: 16604 - protein, 59 aa, Artificial Sequence
  Synthetic
EEVEKELKRIKDELKRLVEKAERSLRESEERLRRLLEEAEKRNRKVEREIEKLLDDTRK

SEQ ID NO: 16605 - protein, 56 aa, Artificial Sequence
  Synthetic
SKEEKITRDAEEVLRRSEEIIRRLLRRLEEVLKDLERSARENKKRLDKILEDLAKL

SEQ ID NO: 16606 - protein, 56 aa, Artificial Sequence
  Synthetic
EKRVKRMEEELRRLHEEVRRRVEKVKRDMDRLNKKIKEDSRRVNEEIRKLLEDKTR

SEQ ID NO: 16607 - protein, 56 aa, Artificial Sequence
  Synthetic
SEEEKVRKELEEVLRRSDEDIERNRRRLEKVLDDLRRSAEENKRRLKEILDRLKDT

SEQ ID NO: 16608 - protein, 56 aa, Artificial Sequence
  Synthetic
EKEVRKVKDRLDKLHEKVKRISEEVNERIRRLNKRIKEISKRLNEELEELLRRRRT

SEQ ID NO: 16609 - protein, 56 aa, Artificial Sequence
  Synthetic
DELEKFKEDVKEVIKKLAETIKRLLDDVRRVLEKLRKLAEENKERLDRILDELRRL

SEQ ID NO: 16610 - protein, 56 aa, Artificial Sequence
  Synthetic
EKEVARLREEIKKLNERLKREVERLKRELEKLLRDIEKTSEDANRRLKELLDRTRK

SEQ ID NO: 16611 - protein, 56 aa, Artificial Sequence
  Synthetic
RREEELLERAEEVLEKLERIIEETERELKEVLDRLRKSIEDNLRRLKKVLKELKDN

SEQ ID NO: 16612 - protein, 56 aa, Artificial Sequence
  Synthetic
EKDLTEVKKRLRDLLKKMEDVLREVKKRLDDLNREMDDRSRKANEELRDLVRRKEK

SEQ ID NO: 16613 - protein, 61 aa, Artificial Sequence
  Synthetic
DVERKLREVEERHKDVLKKAKELLDKVEEDHKKSSKEVEDVLEEMRRRAEKLVRDAVRKKG

SEQ ID NO: 16614 - protein, 59 aa, Artificial Sequence
  Synthetic
DELARRIEEELEKLLRTLEELVTEIIKELEKLLKTHEDLLREVEKTLRRIIEELEKRDK

SEQ ID NO: 16615 - protein, 61 aa, Artificial Sequence
  Synthetic
SVEETLRTVEEEHRKSSKEAEELLEEVERRHEESSKRLEDTLREAEKEVRRLAEDVVRRRG

SEQ ID NO: 16616 - protein, 59 aa, Artificial Sequence
  Synthetic
KELVDEARRELKELLETHKETVKRVLDKLRDLLRTHEEKMKDVEETLRRLLERLKEETR

SEQ ID NO: 16617 - protein, 61 aa, Artificial Sequence
  Synthetic
KVEDSLREVKKRHKDKVDEVRKRLREAEEENKRLLDEVRRELERVEERIRRIVEEIVRKKG

SEQ ID NO: 16618 - protein, 59 aa, Artificial Sequence
  Synthetic
DEEARDIERRLRDLERTLEELVKEADERLKRSNEEDEERIRRVRKKLEELLRELEKRDE

SEQ ID NO: 16619 - protein, 58 aa, Artificial Sequence
  Synthetic
DEDRDLKRELDRLLREHEELVDRSTKRLEKLLRKHEREARESKKELEKLNDELREIAR

SEQ ID NO: 16620 - protein, 59 aa, Artificial Sequence
  Synthetic
EDVKRKLEEVRRRIEESVKRHRETVEEMRRRVDESVRRHERTVDELRRTHEELIERVRR

SEQ ID NO: 16621 - protein, 59 aa, Artificial Sequence
  Synthetic
KDEEKIIEDLKRLLRKHEKLVEESRERLKRLLETIRKIAKDIVERLKRLNEELREIAKR

SEQ ID NO: 16622 - protein, 59 aa, Artificial Sequence
  Synthetic
EEAREKIKRVVEELKESVERHERDVDRVRREAERLLEEVTRRIETVRRTHERLIEEIKK

SEQ ID NO: 16623 - protein, 59 aa, Artificial Sequence
  Synthetic
SEKDEIKRELEELLREHEKLAEESRRRAEELLRDIERRARESLTELRELNKKLREEARR

SEQ ID NO: 16624 - protein, 59 aa, Artificial Sequence
  Synthetic
EDVEREIRKVREDLKRSVDEHRKDLERIRRELEELLEKHHEDLRDVERTHRELLKEIKR

SEQ ID NO: 16625 - protein, 56 aa, Artificial Sequence
  Synthetic
DVEDELRRLHEENKDLLREAEEELERLHRENKKLLEDARRLLERLEEELERIERRL

SEQ ID NO: 16626 - protein, 59 aa, Artificial Sequence
  Synthetic
REEVEREVRKIEKLIRDSRERVRELIEKIERTLRDSERRVRELVKEVEKRLREIERKVE

SEQ ID NO: 16627 - protein, 56 aa, Artificial Sequence
  Synthetic
DVEKELKELHDKNEEILERARRLLERLHKENEEINKRVEEALRRLAEELRRLKEEL

SEQ ID NO: 16628 - protein, 59 aa, Artificial Sequence
  Synthetic
RREVKELIRKIDELLRRSKEEVDRLVKEVERLLRESKRRVEEVIEKLRKIIEELEREVR

SEQ ID NO: 16629 - protein, 56 aa, Artificial Sequence
  Synthetic
REVEEVIKDARRLLEELRKHSEDEVRKVEEEIKRLRDDNKRAVDDIERLLRELEEA

SEQ ID NO: 16630 - protein, 59 aa, Artificial Sequence
  Synthetic
RRAETKLEELRRRLDEILRTTEELLRRLKRELEKLSEESKARLDELKRKLDEILKETRR

SEQ ID NO: 16631 - protein, 57 aa, Artificial Sequence
  Synthetic
DEAREIVRELEKRIKDIEDRARKLIRELEKSLEDLKRRVEEMLREWEEESKELERRN

SEQ ID NO: 16632 - protein, 56 aa, Artificial Sequence
  Synthetic
REKVKEIKKRLDELLKRIEDELRRIREEDKRIHDEVEKELRKLERRDEELLKRLED

SEQ ID NO: 16633 - protein, 57 aa, Artificial Sequence
  Synthetic
SEAEDIVRKIEELLKRHHDRVEEMLRRWEELTRRHSEKAEKIVREVEKLIDELREAK

SEQ ID NO: 16634 - protein, 56 aa, Artificial Sequence
  Synthetic
EEEVKRLEKEIRDNLREMEERLKELEKRDKDNLDRIRELHRRLREELEKLLEDARR

SEQ ID NO: 16635 - protein, 59 aa, Artificial Sequence
  Synthetic
SMDELLKRLEEEDRKLNEESKETLERLRKHDEDLNRKNREKLKELKDRVDRVLEDAKKR

SEQ ID NO: 16636 - protein, 59 aa, Artificial Sequence
  Synthetic
EDDVRREVEDVKRRIEDSREKLRKLTEKWKKLNRESDEKVKKHVEDVEREIEKVRKEAE

SEQ ID NO: 16637 - protein, 59 aa, Artificial Sequence
  Synthetic
SSEEELKKLSDKARRLNDENRKILERLKEHDERLNKRNKEELKRLREDVERLLEDARRR

SEQ ID NO: 16638 - protein, 59 aa, Artificial Sequence
  Synthetic
EEDVKRKLDTIDKVIRDVRRRIEEHVRRWEELNRRSKKEIEDHVKTVEDVIKEAKDRID

SEQ ID NO: 16639 - protein, 61 aa, Artificial Sequence
  Synthetic
DEDEEVDREVREMIKRLEEHVKRDEDTLEEMLKRLRDHVERDRRRLEELLKDLERLVRERG

SEQ ID NO: 16640 - protein, 55 aa, Artificial Sequence
  Synthetic
EELKRLDREAEELLRRVDRLNEEVEKKLRKLLEEVRRENKRLEEEAKRLLDKAEE

SEQ ID NO: 16641 - protein, 61 aa, Artificial Sequence
  Synthetic
DEDEEVRKKVEEEIKRLKKEVEEDRRDVERLDEESKDKVRRDEKKVKDLLKELEDLVRRDG

SEQ ID NO: 16642 - protein, 55 aa, Artificial Sequence
  Synthetic
EELKRLEEEAKDLLRDVERLNRELHKRNREILEEATRRNEELKRELKELLDRARK

SEQ ID NO: 16643 - protein, 61 aa, Artificial Sequence
  Synthetic
SEEERVKEELDKAIKTLEKLVKDDLKKVADALRRLREHVEKDLRDLEEVLRELKELVDKTG

SEQ ID NO: 16644 - protein, 55 aa, Artificial Sequence
  Synthetic
EELKRAERELDRLLTEADRRNDELRREAERLLEKVNEDNRTVKERARRLLDDARR

SEQ ID NO: 16645 - protein, 61 aa, Artificial Sequence
  Synthetic
REDEEIVKEMERLLERLEELSRRIMEEVKRIDKESEDHIKRDEDKLREELERLRDLVRREG

SEQ ID NO: 16646 - protein, 55 aa, Artificial Sequence
  Synthetic
EELKELEERAKRLLERHERTNEELHRRNEEILRKANELNEEVRRRLDKLLDEVRT

SEQ ID NO: 16647 - protein, 61 aa, Artificial Sequence
  Synthetic
DREREVRRRVKEALDEIKRHVDRDRKKAEDMDRRSRELSDELRRRVDDLIKRLKELVDRDG

SEQ ID NO: 16648 - protein, 55 aa, Artificial Sequence
  Synthetic
EELDELRKELDKLLTEVDETNKKLHEDNKRILDDHDRINEELRRRMEALLREATR

SEQ ID NO: 16649 - protein, 61 aa, Artificial Sequence
  Synthetic
SEEEDMVRRVREMIKRLRDHVRRDKDKLDKEDKRSADHVDRDRKRLEDLLKELRDLVRDTG

SEQ ID NO: 16650 - protein, 55 aa, Artificial Sequence
  Synthetic
EDLKRLEKELRDLLDEVNKENEKVHRRNREILKRADELNEEAERRLRELLREAEK

SEQ ID NO: 16651 - protein, 61 aa, Artificial Sequence
  Synthetic
KEDEEVKDKVEKLIRKLEKESRDISEEVKRLDEESKKLARDLTEEVDRVIKRLRELVERDG

SEQ ID NO: 16652 - protein, 55 aa, Artificial Sequence
  Synthetic
EELKKLEKKLEELLERHRRDNKRLHEENRRILEELRRRIKELKERLRRLKEEARK

SEQ ID NO: 16653 - protein, 60 aa, Artificial Sequence
  Synthetic
ETDERLDELRRRLEKSLKDHKKLLDEVRKKAEELLDRNARLLEELKRELDELLKKVEEDN

SEQ ID NO: 16654 - protein, 59 aa, Artificial Sequence
  Synthetic
REVVEELLRRAEEEIRRHRKKVKESLDRLEDEIRKVEEDSRRSEKKVRKLIEDVKRRVK

SEQ ID NO: 16655 - protein, 59 aa, Artificial Sequence
  Synthetic
STEETLEKLDRDLKDSSRRNEELLKRVDDRLRESSKENRKILKELSDRLRDLLEKVKKD

SEQ ID NO: 16656 - protein, 59 aa, Artificial Sequence
  Synthetic
DKVVRELVKRAEDEIRDHKRLSKESLDRLDEEIKRHRELSKESMEEADRLIKTVKERVR

SEQ ID NO: 16657 - protein, 59 aa, Artificial Sequence
  Synthetic
ELDDLLREVEKRVRDLNRRNEEELRRVEDRMRESLRKSEEDLRRVEERLKKTLTRVKTE

SEQ ID NO: 16658 - protein, 59 aa, Artificial Sequence
  Synthetic
RRSAKKILDDLERTLEDVERRSRESVRRLREEIETHRKLVEELKKRLDDLEEEVKERVR

SEQ ID NO: 16659 - protein, 56 aa, Artificial Sequence
  Synthetic
SSDEILKRVKEELDRLLEENKRLLEEARKRLEDLIRKNREDLKRVEEKMRRLLEET

SEQ ID NO: 16660 - protein, 59 aa, Artificial Sequence
  Synthetic
EEVVRRLAEELRRLIEEVKRKIEESERRLKETLDRYRKLVEDSLRKLEETIRRVREESR

SEQ ID NO: 16661 - protein, 56 aa, Artificial Sequence
  Synthetic
SSEELLRKVKEDAKKIIKENEELLRKVDKDMRDIIKENRDLLEELTERVKRLLDRT

SEQ ID NO: 16662 - protein, 59 aa, Artificial Sequence
  Synthetic
EEVVKRILEELKKLLDEAERLSRESLKELEKMLREYRESVERSLRKVDDTLRRVEEKSR

SEQ ID NO: 16663 - protein, 59 aa, Artificial Sequence
  Synthetic
DDKRLLEEIRRRADELIKENEELLRRLEKLNEDLERRNKELNERLAERVKRLEEDVRRR

SEQ ID NO: 16664 - protein, 59 aa, Artificial Sequence
  Synthetic
RRIVEEEVDRVRKTIEELKRKSEDLVREHEEIVRDLERKSRELVKKVEKLLRDVRERAR

SEQ ID NO: 16665 - protein, 60 aa, Artificial Sequence
  Synthetic
SVDEMLKEIRDRAKKVDEDNRRLVERLEERNRELDERNKRLLDDIRRKVEEVMRIADERV

SEQ ID NO: 16666 - protein, 55 aa, Artificial Sequence
  Synthetic
KELVDRVRKLLEEVRRKSEKLVREHEDLVRRNEEHSRRLVEEADRILERAKRELD

SEQ ID NO: 16667 - protein, 60 aa, Artificial Sequence
  Synthetic
SVEEMLRRLRERDEEINDRLRRLAEDLKRENKRLDDENKKLVDEIREDVERLKEKLDRKL

SEQ ID NO: 16668 - protein, 55 aa, Artificial Sequence
  Synthetic
SELLKRWEELLRRLEKRIRDLVEDHKRLVEENERHSRKLVEEVKKALTDAEKKVE

SEQ ID NO: 16669 - protein, 60 aa, Artificial Sequence
  Synthetic
SVEELLEDIRRRVEKVKEDNKRMLEDLERKNRELKKEADDLAREIKKRVRDLEKELDEKL

SEQ ID NO: 16670 - protein, 55 aa, Artificial Sequence
  Synthetic
SKLVEEVRKLLEEARRESEELLRRHKKLVDDNRRHIRKLFEDVKKILDDARKEVE

SEQ ID NO: 16671 - protein, 61 aa, Artificial Sequence
  Synthetic
SEEEEIVKDVERVIRELEERHKDLVRRAREDIKRLREHIRRSIRALDEDIKRIEEKIRRDG

SEQ ID NO: 16672 - protein, 56 aa, Artificial Sequence
  Synthetic
EDLVRDLERKNKRVIDESRRLLEELRRRYEELLREYRELLEDLRRKYKRIEDEAKR

SEQ ID NO: 16673 - protein, 61 aa, Artificial Sequence
  Synthetic
SEKEEIVKTVKTVIDRLEEEHRKILEDLRDDIRRADEYIKRSIDEVEEDLRRIEETVRRDG

SEQ ID NO: 16674 - protein, 56 aa, Artificial Sequence
  Synthetic
ERLVRELEKENEKLKRRSERMLEELEKEYRRLLKKYEDLLRELERKYEEIKDKLRK

SEQ ID NO: 16675 - protein, 61 aa, Artificial Sequence
  Synthetic
SEDEDIVRKAKEDIERLKREVEETIKRVEDDARKVEKEVRDIVERTRKEIKKLEDEVRERG

SEQ ID NO: 16676 - protein, 56 aa, Artificial Sequence
  Synthetic
EKLVEELRRELEKLKKEIDDLLRDLEKKYDDIRKKIRKLSEELKKLLEELKRKLDE

SEQ ID NO: 16677 - protein, 61 aa, Artificial Sequence
  Synthetic
SELEKIVEEVRRDIKRVRERVEEIIRKTDEMIRRLEEHIKRSIERVRKDAEDIERTVRRDG

SEQ ID NO: 16678 - protein, 56 aa, Artificial Sequence
  Synthetic
KDLLDELRRRYEELEERIRRLSRELEEKLKKLRKRYEDLLEELEREYRRIAEEARR

SEQ ID NO: 16679 - protein, 61 aa, Artificial Sequence
  Synthetic
SEEEKIVEEVKRDIKKVDDEVKDIIRRTDKAIKDLRREHKELIDRTRKAIEELEDEVRKRG

SEQ ID NO: 16680 - protein, 56 aa, Artificial Sequence
  Synthetic
EDLVDELRKLYDTIREKIKRLSDRLREKNEKLKKESDDLSRRLRKELEKLEREVRR

SEQ ID NO: 16681 - protein, 59 aa, Artificial Sequence
  Synthetic
SKEELLKEIRDELRKLKKKHDDLLEEIKREYDRLREKVRKDLEDIERKLRKLEEDVERK

SEQ ID NO: 16682 - protein, 59 aa, Artificial Sequence
  Synthetic
EEEVKRVVERVKELIKRLEDNIREAIRKLREDIKRLEEEVEKARKDVEDFLRELRKKVK

SEQ ID NO: 16683 - protein, 59 aa, Artificial Sequence
  Synthetic
SSDELAEELKREYDRNKEEHKKLLEELKKEYKRLLDEHRDLLRRIKERLDRLLRRIEEK

SEQ ID NO: 16684 - protein, 59 aa, Artificial Sequence
  Synthetic
EELVERVIRDVRKHIEDNTENIRRDIERVRKDIETLEENVKDAAKKVEDILKTLEDEVK

SEQ ID NO: 16685 - protein, 59 aa, Artificial Sequence
  Synthetic
DKERLAEELRRLYERNKREHEKLLKKIEDDLRKLEEDHERLLREIEEAAERLRREIERK

SEQ ID NO: 16686 - protein, 59 aa, Artificial Sequence
  Synthetic
EELVKRVVDRVRRHIEENTKNIEEAIKRVEDVIRELRKNIEEAIKRVREVLKRLKDEIK

SEQ ID NO: 16687 - protein, 59 aa, Artificial Sequence
  Synthetic
SEDELLDRLREKYERNKERHKRLLDELRKRYEDLKREHEKLLRDIEEELKKLEDKIRRK

SEQ ID NO: 16688 - protein, 59 aa, Artificial Sequence
  Synthetic
EDLVRKAIEDVDRHIKENTKNIEDTIRKVKKNIEDLKRNVEEAIKKVKEVLREIEERTR

SEQ ID NO: 16689 - protein, 59 aa, Artificial Sequence
  Synthetic
SKEELLKRLKERNERLNEDSERLAREIKRRLEELRKEHRRLLKEIEERLKELEEDIRRK

SEQ ID NO: 16690 - protein, 59 aa, Artificial Sequence
  Synthetic
EEDVKRVIRRWEELLKELEKDNRRVVKEAKELIDRLERNIRERIKEVRDALREIRKKVK

SEQ ID NO: 16691 - protein, 59 aa, Artificial Sequence
  Synthetic
STDEKLKELEKRNRDLNEESRKLAEEIRKRYEDLKKEHEDLLREIEKRLRDLMREVERK

SEQ ID NO: 16692 - protein, 59 aa, Artificial Sequence
  Synthetic
EKSVDDVIRRWEELLEELRRRNEEAVRRMERNIDELRRNVRETIDRVRKLLEEIKRKVD

SEQ ID NO: 16693 - protein, 60 aa, Artificial Sequence
  Synthetic
SEAERVVEELERLLKKNRDDNERVIRRLEELLDRLREKNERAIEELRKLLDELKKVVDRG

SEQ ID NO: 16694 - protein, 56 aa, Artificial Sequence
  Synthetic
RELLREIEERLKTLSEESKRLIDRIREELKRLTKESEDLLKDIERLLREVKERART

SEQ ID NO: 16695 - protein, 60 aa, Artificial Sequence
  Synthetic
DEMEDLRRDVERIHEESRKLSEDSVRTAEKIHRESEKLIDDLRRKVEKILKEVEDVVRRG

SEQ ID NO: 16696 - protein, 56 aa, Artificial Sequence
  Synthetic
EEELKKLEDRSRKLLEENKRLNEDLDRRSEELKARLKDILRRIDERLRDLEREADR

SEQ ID NO: 16697 - protein, 60 aa, Artificial Sequence
  Synthetic
DEVEELKRRAEEILRKYDEDSKRIVEEAERIVRTSAEKIERLRKKAEDILREASKVVDDG

SEQ ID NO: 16698 - protein, 56 aa, Artificial Sequence
  Synthetic
ERDLEKIETDVERLERKSKKLLEDLREKSERLKKRLEDILKRIKEEVERLKRKVEK

SEQ ID NO: 16699 - protein, 59 aa, Artificial Sequence
  Synthetic
DEMEELKKEVEEILKEYEKRSRDLFKELKEILRRSKELSEDSKREADKILRDAEKVVAD

SEQ ID NO: 16700 - protein, 56 aa, Artificial Sequence
  Synthetic
EDDLRRIEEKVKKLEKESRELLKRIKDESEELKRDNKRLNDEVREELEKLKERVRK

SEQ ID NO: 16701 - protein, 60 aa, Artificial Sequence
  Synthetic
DEMDELRREVKEILKTTEELIKRLEDKVRDILRRYKEVSDDIVRKAEDILRKAEDILRRG

SEQ ID NO: 16702 - protein, 56 aa, Artificial Sequence
  Synthetic
ERELEEIKKESEDLERRLKKVLERIEREVRRLEEETKELLKRIAEEVERLIREAEK

SEQ ID NO: 16703 - protein, 60 aa, Artificial Sequence
  Synthetic
KEAEDLVREVERILEDYDRVVKELKDDADRILEESRRLIEELKKKAEDILRRVRKVVEDG

SEQ ID NO: 16704 - protein, 56 aa, Artificial Sequence
  Synthetic
EELLERIKDRLRKLHEKSKKLLTDIKRESRRLEKRLEDILKRIKEEADKLKEEADR

SEQ ID NO: 16705 - protein, 59 aa, Artificial Sequence
  Synthetic
REEELERRVREESEELNRRLAEVHKRLRKKSKELNDRHKELDDRIRREADRLRKDIRRQ

SEQ ID NO: 16706 - protein, 55 aa, Artificial Sequence
  Synthetic
DEVLKELKEMHDRLREHVKRDSERAERMHEELKRLSDELERRVREALKRLKEKVR

SEQ ID NO: 16707 - protein, 59 aa, Artificial Sequence
  Synthetic
KKEEVRKRIEEELRRLKKDHRRLDEEIKRKLKKLDEEIKEVHERLKKAARDLEDEARRN

SEQ ID NO: 16708 - protein, 55 aa, Artificial Sequence
  Synthetic
KEVEKDVEDLLKELEDDSRRLEEEVERLIERVKRHVERDERRVREMLREIKEKIK

SEQ ID NO: 16709 - protein, 59 aa, Artificial Sequence
  Synthetic
SKEDLDRELRRLSEELNREHKELDERIRRELEKLRTRIDKVHEDIRREMKRLEDEVRKR

SEQ ID NO: 16710 - protein, 55 aa, Artificial Sequence
  Synthetic
EEVFEDAERLHRELKKKSRDLEERVKKLLEEIEDHVRRDETRVRKVLRDIEEDIR

SEQ ID NO: 16711 - protein, 59 aa, Artificial Sequence
  Synthetic
SKEDMLREAEERSRRLNEDHKRLDDELRKESEKLNRRHRDLDEKIDRELRRLKKDIRRR

SEQ ID NO: 16712 - protein, 55 aa, Artificial Sequence
  Synthetic
RELLERLRKVHEDLKKKSEDLKRTAEKLHRELEKESRDLVRDVERALDELRRKVE

SEQ ID NO: 16713 - protein, 60 aa, Artificial Sequence
  Synthetic
SSEELLRDIERRLEEMNRDTERVVEEIRRRLEELRKRHKETIDKIREELKKVEDLVRRRG

SEQ ID NO: 16714 - protein, 55 aa, Artificial Sequence
  Synthetic
EDVLRRAKRLIEKYKEDTKRIKEKLEKVIEDLRKNIEDFEEDVRRVLEELKKRIK

SEQ ID NO: 16715 - protein, 60 aa, Artificial Sequence
  Synthetic
SSRELLERIKEELKELEDRHRDLLRRIEEKLERLNRRTREVLERIKRKLDELKKRVEEAG

SEQ ID NO: 16716 - protein, 55 aa, Artificial Sequence
  Synthetic
EDLLREVKELIERLRENIKRAKDKVEELIKKYKRDTDEAKKEVDEEIKRLKEEVD

SEQ ID NO: 16717 - protein, 60 aa, Artificial Sequence
  Synthetic
DSERLVREIRERLKKLEKEHRELLEEIKDRLRRLNEESKKLLDDIKRRLEELRDRIRRAG

SEQ ID NO: 16718 - protein, 55 aa, Artificial Sequence
  Synthetic
EDVLRDLEKLIEDLKRNIERARAKVEKLIKEYEDKLEKIVRDAEELIKDLDRKVK

SEQ ID NO: 16719 - protein, 59 aa, Artificial Sequence
  Synthetic
SSEEILRKIEEELERLEREVRKIHRDNERKSEELNRRSKKILDDIRRELDRLKKEAEEK

SEQ ID NO: 16720 - protein, 55 aa, Artificial Sequence
  Synthetic
KEVVKEMRRALEEIKKEIEKVRKELEKRNREYRKRSEEVREEAERKLEEIKRRTD

SEQ ID NO: 16721 - protein, 59 aa, Artificial Sequence
  Synthetic
RSEEILREIRDRLRKLNEESEKVHEENERRSRELNERSREILKRIDEELKRLKKEVDDK

SEQ ID NO: 16722 - protein, 53 aa, Artificial Sequence
  Synthetic
VVRDLKKKLERYKRETDRVRKELRDLNKKYEDRSREIKRELERLLRDIKRRID

SEQ ID NO: 16723 - protein, 59 aa, Artificial Sequence
  Synthetic
SLEEVIKTVRKLLEEVERRLREVVERAERMLEEVRRRTREVSEEAREMLKDVEKALRDK

SEQ ID NO: 16724 - protein, 59 aa, Artificial Sequence
  Synthetic
DRIVEKLLRDAERIVKRLRELIEKLREEVEKIVDENRKTVEELRRRNEEIVRRLRREIE

SEQ ID NO: 16725 - protein, 60 aa, Artificial Sequence
  Synthetic
DVKEVLDDAERKLREVLKLIEDSLKKLKELSDEVIERIARSLEKLEKLIRDVDEELKRKV

SEQ ID NO: 16726 - protein, 59 aa, Artificial Sequence
  Synthetic
KEVVKEIKERVDKVVDEARKLVEESERSIRELVERSKKVVEESERSIEELRRELKETVK

SEQ ID NO: 16727 - protein, 60 aa, Artificial Sequence
  Synthetic
DLEEVRERARRLLRKLEEDLERVHKEMEELLRELEERIKASLERLDELLKRLADKLRRDV

SEQ ID NO: 16728 - protein, 59 aa, Artificial Sequence
  Synthetic
KEVVKEIEDRVRKVAEKVREVIERNRKLVRDVLDKIRRMLKESERSVEEVLKRLDDELK

SEQ ID NO: 16729 - protein, 60 aa, Artificial Sequence
  Synthetic
SLDEVVKRLEDLLREVEEKSKESSKRMEDLNREVNERLRRSSERLKRLNDEVKKRLEDAG

SEQ ID NO: 16730 - protein, 56 aa, Artificial Sequence
  Synthetic
VEEIKKLADKVVTELEKLVEDDRRLAEESFERARKIVEEDERLARESVDRARRLVD

SEQ ID NO: 16731 - protein, 59 aa, Artificial Sequence
  Synthetic
KLDEVIEEIRKLLRRMEEELRRSVEEIDKLLREVRELLRESSEKVKELLRRVTEELKKR

SEQ ID NO: 16732 - protein, 58 aa, Artificial Sequence
  Synthetic
KLVEDLKRRAEEVIRELREIVKRNTEIAREVVERAKRIVEKNEKLLKDVVEEAKKIVK

SEQ ID NO: 16733 - protein, 56 aa, Artificial Sequence
  Synthetic
SELEKAKEDVDRLLEDVNRVSEEVEDRVRKLLADSDRVLEEVERRVREVLKRLKDA

SEQ ID NO: 16734 - protein, 56 aa, Artificial Sequence
  Synthetic
VKTVADELRKVVKELLEINRRSLEELTKLVDESRRVNEKVMEELKKLVDDLRRRIE

SEQ ID NO: 16735 - protein, 58 aa, Artificial Sequence
  Synthetic
SEIEKVKEVVREVIERSRKLLKEVRDTVEKVIDESRKLSDTVRRRVEDAIRDVLERRG

SEQ ID NO: 16736 - protein, 59 aa, Artificial Sequence
  Synthetic
REEVKKVIEDLTREAKRSLERNREVVKELKKLADDLKDLNKKSVDRLDDLVRRLKERTE

SEQ ID NO: 16737 - protein, 60 aa, Artificial Sequence
  Synthetic
KRAEDVLEKLREDAKRVLKRNRDSVKEAEDLVRKSLRTSEEVVKTLRTELKKLLDELDRV

SEQ ID NO: 16738 - protein, 59 aa, Artificial Sequence
  Synthetic
EKVLRDIEREVRKIIKELEDMDDELRRILEEVIERSRRVNERLKELLKEADDRLREKLR

SEQ ID NO: 16739 - protein, 59 aa, Artificial Sequence
  Synthetic
DAAEELLRLVEDVARELKRLVDELLKENRETVERLKKVVKRSEEINREVVRTLRELVAN

SEQ ID NO: 16740 - protein, 58 aa, Artificial Sequence
  Synthetic
EKIKEVRRSIEEARRRVEEALREVNEASKEAERTVREALKRSREAVEKAVRDVTEAAR

SEQ ID NO: 16741 - protein, 56 aa, Artificial Sequence
  Synthetic
KELEDVLRESEKTAEELLRRVKKSIDRTRDVVRRLLEEIRKSIEETKRVADEAKRE

SEQ ID NO: 16742 - protein, 58 aa, Artificial Sequence
  Synthetic
DLVRRLERISEEVRRRVEKLVREDRKILEDVARALRELVKEDEEILRRVVKDLRDKTR

SEQ ID NO: 16743 - protein, 59 aa, Artificial Sequence
  Synthetic
DEDKKVVRKVERIIKRVKELHDKSVRDSEEVVREVLKRHKESVEKIKEIVRRIVEIAAR

SEQ ID NO: 16744 - protein, 55 aa, Artificial Sequence
  Synthetic
EELKEVIRRVEKLSEDVKRENEKSNDEVRKLSEDAIRENEEVLRRARKLVDDLRR

SEQ ID NO: 16745 - protein, 59 aa, Artificial Sequence
  Synthetic
DEEKEVVKKLRDIIREVERLHTESVRKVEEIVRRVLRLHKETVRELKEIVKRIVDIARN

SEQ ID NO: 16746 - protein, 55 aa, Artificial Sequence
  Synthetic
RELEKVAKEVEDRSKELLDRNEEVLDRVRKLSEDVLRENREVIERVREEVKKESK

SEQ ID NO: 16747 - protein, 59 aa, Artificial Sequence
  Synthetic
SEADKVVAELEKIVKDVVDAHKDSVRKLREIVRRAVERLRKDVDDTRRVVKEIVDIARS

SEQ ID NO: 16748 - protein, 59 aa, Artificial Sequence
  Synthetic
ERVRRKLEEVVKKVRDLSRRATEEVEEVIKEVRELVRRLKEENKRVVDEVRKRVEDTRK

SEQ ID NO: 16749 - protein, 60 aa, Artificial Sequence
  Synthetic
KSMEDVVRKLDELVKTDKEIADRVVKELKDIVKRVEELVEDIVTKSRASVERVRDVVTRG

SEQ ID NO: 16750 - protein, 59 aa, Artificial Sequence
  Synthetic
REAKELLDRLKRRLEKSTEEVKKKLETVLRELEEVIKRVKEELERVNRELRKVIEDAKK

SEQ ID NO: 16751 - protein, 59 aa, Artificial Sequence
  Synthetic
ELEKLIRDVVRENEESAKEAHRRIKEVVRTSEDLVREVRERVRRIVESSKRVVEEVRKK

SEQ ID NO: 16752 - protein, 56 aa, Artificial Sequence
  Synthetic
MEKLLRDLKKLIEDNERVVRELKKNLDDDSERVKRVADELLKNLKKDTKKVKDTAK

SEQ ID NO: 16753 - protein, 59 aa, Artificial Sequence
  Synthetic
DEAEDVVKRADDIVKRNRELLERVVRDLERIVRKNKDIVRKVVDEAKKLVKTVEDLSRQ

SEQ ID NO: 16754 - protein, 59 aa, Artificial Sequence
  Synthetic
KEVEDLLRRVEEKLRKSVKEVEELLDTVRRRLEDSSRDVKRLLKEVLDRLEDVLDKEEK

SEQ ID NO: 16755 - protein, 59 aa, Artificial Sequence
  Synthetic
SAVEEADKEVRRILKKNTDLVRRVVEEAKKILDRNEKRVREVFKELTRLLDELRKLIEE

SEQ ID NO: 16756 - protein, 59 aa, Artificial Sequence
  Synthetic
EEVERLLRELERRLEDSVRKARELLKDIERRLRESIKRSEELLRDVERRLKELEERLEE

SEQ ID NO: 16757 - protein, 60 aa, Artificial Sequence
  Synthetic
DVEEELKRVVEKLRDVERKVRELNKRVTDKNEDVVRTVRELNERVTRENRRVVEDIDRKK

SEQ ID NO: 16758 - protein, 56 aa, Artificial Sequence
  Synthetic
LDDVLRRLEELVKDLERLIEESVRYLERNVERSRELVERSLRYLKENVDRSRKLAE

SEQ ID NO: 16759 - protein, 59 aa, Artificial Sequence
  Synthetic
DEVREVVERARKLVKDNLDAARKAVKRLRELVKENLDTVRDVVRKLRKLVEDLKRLIRS

SEQ ID NO: 16760 - protein, 56 aa, Artificial Sequence
  Synthetic
KELADEVRELAKRSHEELKRLLDEVRKLLKDSERALRKLLEDVRREADKVAEEVRT

SEQ ID NO: 16761 - protein, 59 aa, Artificial Sequence
  Synthetic
SEVDEVVRRARELVKKNRDDVKKVVEDLRRIVKEDLDTARRVVKRLRELVEELKELIRS

SEQ ID NO: 16762 - protein, 56 aa, Artificial Sequence
  Synthetic
KELADEVDELMKDSDRELKRLLEEVRKLAKRSTDELERLIEEVRKELEDVLDEARQ

SEQ ID NO: 16763 - protein, 59 aa, Artificial Sequence
  Synthetic
SREEELLERLRRVVERNKKLVDDLADRADKVVKENEKLVRDLLEESRKTSEILDRLVKN

SEQ ID NO: 16764 - protein, 54 aa, Artificial Sequence
  Synthetic
LVEEVRRLSEKSNRDLKELVKDIERKLDKVHKDLEKVIEEVERSNERVKEEVKT

SEQ ID NO: 16765 - protein, 60 aa, Artificial Sequence
  Synthetic
SDAERIVEEAKRLVEENTELVERVLEKLERLVRENRTLVERVIEELDDLVRRIEDVVRRG

SEQ ID NO: 16766 - protein, 59 aa, Artificial Sequence
  Synthetic
KKLEKLLREVERLMEESHKRLKEVADTARRLMDDSERELDRLLREAEKKIRDVREEIRR

SEQ ID NO: 16767 - protein, 59 aa, Artificial Sequence
  Synthetic
SLVDEILKDLDRLVEENEKLVKKIVEDAEELVKRNTDLVEEVLRELKEIVETIRDLVRR

SEQ ID NO: 16768 - protein, 59 aa, Artificial Sequence
  Synthetic
EELKDVLRRVEEKIRKSNEKLEKLLEEVSRLAKRSDERLKKVLEDIKEEIRKVKEDLER

SEQ ID NO: 16769 - protein, 59 aa, Artificial Sequence
  Synthetic
SLEEVVKKAEDLLKRVNDELKKVSKKVRDDLRRVNEKLKTVVEDVLRKLEAVVDKIRKS

SEQ ID NO: 16770 - protein, 56 aa, Artificial Sequence
  Synthetic
VKDVDKRIRDVVRRHEEVVETNARRVDEVVKRHDKLVKDLERRVEKVVRELEEKVR

SEQ ID NO: 16771 - protein, 59 aa, Artificial Sequence
  Synthetic
SLDEIVKRAEEELKRLNEELKRVSDRVKERLDRVLDELRRISERIKELLERVKRKLERE

SEQ ID NO: 16772 - protein, 56 aa, Artificial Sequence
  Synthetic
AEDLRREVEEIIRRHKEVIRKNEEDVKRVLDTLREMLKKNKKLVDDMVRKLDETIK

SEQ ID NO: 16773 - protein, 55 aa, Artificial Sequence
  Synthetic
SEAEKVLEKVERVAREVLERIKRIVEHTKRVVEDVIRRADESVRRSEEIMEDVRR

SEQ ID NO: 16774 - protein, 56 aa, Artificial Sequence
  Synthetic
KEDVERLVRTVKEELDRLVDESRKLSRDVRETLEELVKRSEDVTRRVEETLREIVK

SEQ ID NO: 16775 - protein, 56 aa, Artificial Sequence
  Synthetic
DELERILEEVKKVVEEVVRRAEESVKKTEDVMRKVVERVARSLEESRRVAEEVERR

SEQ ID NO: 16776 - protein, 56 aa, Artificial Sequence
  Synthetic
EKDVKRLVDEVRKELEELVRRSEELTKEVKKTLEELVKESKEVVKDVEKKLREIEK

SEQ ID NO: 16777 - protein, 57 aa, Artificial Sequence
  Synthetic
REVDEAVKNNEEDAKESRRVVEEAVKRDEDIARDIERRAREVVERDKEIVDEVRRRV

SEQ ID NO: 16778 - protein, 60 aa, Artificial Sequence
  Synthetic
SKEVKDLLDENSKRSNEISREVKKDLERTVRENKKIVDEVRKKLEDTVDKNRRIVEEVTT

SEQ ID NO: 16779 - protein, 57 aa, Artificial Sequence
  Synthetic
SEVDKMLKRSNDIVREIARVVEEAVKTDERIMREILEHARKVVEEDKEIVDRVRKEV

SEQ ID NO: 16780 - protein, 60 aa, Artificial Sequence
  Synthetic
SEEVVRRLRTLVEENRKIVEDVKRELERTVRDNRRIVEEVAKRNHDTVRENKEIVDRVKT

SEQ ID NO: 16781 - protein, 57 aa, Artificial Sequence
  Synthetic
KEAEDVIELVRRILEEVDRRVRDVLRKDEESLRRVKKTVEEVLKRHKDIEDEVRRRV

SEQ ID NO: 16782 - protein, 60 aa, Artificial Sequence
  Synthetic
SEEVKRVLEEIVKKVEEIVKDVERKLRKTVEENEEVVRRVKRYLEKSVEDLEKVVRDVTT

SEQ ID NO: 16783 - protein, 56 aa, Artificial Sequence
  Synthetic
SAEDILREVEELVRRTRKHLEDSLREVTKLVEETKREADRILKEVRDRVKEVIERG

SEQ ID NO: 16784 - protein, 59 aa, Artificial Sequence
  Synthetic
EEVLKTVREELRDIIRRSVEHNRDSLRRLREIIERSLRHVEEVLERVRKEIERIKRETK

SEQ ID NO: 16785 - protein, 56 aa, Artificial Sequence
  Synthetic
SAEDILREIKRLVEETERLLKRILEEVRKLVEETRRRLETILRRVEEKVRRLVEKG

SEQ ID NO: 16786 - protein, 59 aa, Artificial Sequence
  Synthetic
EETLKRALDEARKIIEESKKHVKDVLRKVTDEIRESKKDVERVEDEVDKRIREVDERTK

SEQ ID NO: 16787 - protein, 60 aa, Artificial Sequence
  Synthetic
SIDEVAEEVERLLEEVKETSREVLERVKRELEKIIDTSRRILEEVRRLLERVLEEVERRK

SEQ ID NO: 16788 - protein, 59 aa, Artificial Sequence
  Synthetic
DRDVKRVLDKVRKKIEENKDTVRRVEEEIKKLIEDNKRTSEKVRKEVTDIIEEIKEEIK

SEQ ID NO: 16789 - protein, 56 aa, Artificial Sequence
  Synthetic
DVEDVVREAEDLLRKLEEKSRKVVEDAKRLLDEVKRKMEESVKEAKRLLDEVLRKS

SEQ ID NO: 16790 - protein, 59 aa, Artificial Sequence
  Synthetic
KKIVEEVRRRVEEVVRRDEKSVEDLKREVDRVITELDRLVKRNTEEVERVIRRLDEETR

SEQ ID NO: 16791 - protein, 60 aa, Artificial Sequence
  Synthetic
SEEEDAERLLRDLKRRADEVVKESEKILEDIVRDAERVLRESKRISEEIVRRADEIRRKV

SEQ ID NO: 16792 - protein, 55 aa, Artificial Sequence
  Synthetic
RLVEELRRLVEEVRERLDRSVKKTKELLKEVIKELEKLLKKDEDDVERVIRRLED

SEQ ID NO: 16793 - protein, 60 aa, Artificial Sequence
  Synthetic
SEVEDILRRVEKRARDSLKHLEDVLRKVDKRVRESLDNLRRVLEEVERIVRELERLLDEG

SEQ ID NO: 16794 - protein, 59 aa, Artificial Sequence
  Synthetic
ERLLEEIVRRLEDSLRKVEEIARRIEKRLRDSLRETKRIADEIRKRLEDALRRVEERAR

SEQ ID NO: 16795 - protein, 60 aa, Artificial Sequence
  Synthetic
SDVEKILDDVRKDAERSLENLKEVLEKVEEEVRRSLEDLRKVLEDVERIARKLEELLKEG

SEQ ID NO: 16796 - protein, 59 aa, Artificial Sequence
  Synthetic
EELLRRIERTLRESLEAVKRIAEEIERTLEESLREVERIVKEMEDLVRAALKRVEDKAR

SEQ ID NO: 16797 - protein, 60 aa, Artificial Sequence
  Synthetic
SEVEEILRRIKEEVRESLEDLRRVLEEIEKKAKESLRELKEVLERVKEIADKLKRLLDEG

SEQ ID NO: 16798 - protein, 59 aa, Artificial Sequence
  Synthetic
EKLLRDIKRDLERSLEAVDKIVKEIMERIKESLKATERIVKEMKDLITRVREEVKRRAE

SEQ ID NO: 16799 - protein, 56 aa, Artificial Sequence
  Synthetic
DEVEELKERAKRSNEELKRKVEELKKRAKKAIDDVRRVVDENKKLVKEAIDRLRKT

SEQ ID NO: 16800 - protein, 59 aa, Artificial Sequence
  Synthetic
KETLKKLLEELKKLVDESRRRLDELRKEVEKKVEEMLERARRLLKKTEDLVREVKRRVD

SEQ ID NO: 16801 - protein, 55 aa, Artificial Sequence
  Synthetic
DELKELEDRLRRAEEEARRLLEEIKKRLKESNEELKRLVEENEKLVKEALRRLEN

SEQ ID NO: 16802 - protein, 59 aa, Artificial Sequence
  Synthetic
KDVLRKLLEEVERLVKRVLDELRALLKEVEDLVRKSVEDLRKLLEETRKLVREMEERVR

SEQ ID NO: 16803 - protein, 55 aa, Artificial Sequence
  Synthetic
SLVEKLEKRLRDVIKTIEDIIRENEERLRRSNRELEKLVDENRKLVEEVLKRLAD

SEQ ID NO: 16804 - protein, 59 aa, Artificial Sequence
  Synthetic
ERVLEKLLREVEELAKRVLTELRRLLRETERLVRESEKRLRDLLRDTERLAREVEKRVE

SEQ ID NO: 16805 - protein, 55 aa, Artificial Sequence
  Synthetic
SLVEDLKRELEKAKEEIEKIVRDLERELDRVIKENERLIRENEDTVRKALERLRR

SEQ ID NO: 16806 - protein, 59 aa, Artificial Sequence
  Synthetic
EDVLRELKDRVRRIVEEVARRLEELLKKVKDLVKKSLKTNEDLLRKTEELVRRAEERVK

SEQ ID NO: 16807 - protein, 60 aa, Artificial Sequence
  Synthetic
SEVEEVLKRLKELVDTVLEELKDVIRRIEELLERVRRDNERTIREDEELVRKVLDELRKI

SEQ ID NO: 16808 - protein, 56 aa, Artificial Sequence
  Synthetic
AEEIERVIREAERRLKKLLDELRRLVEEVRRELEELDERLKRSSEEAKKRLDELVK

SEQ ID NO: 16809 - protein, 60 aa, Artificial Sequence
  Synthetic
SEVERVLEDLRRLVRDVEEKLRRIIERDRRLVEEVERENRKTIRKIEELLRKVLEELKDI

SEQ ID NO: 16810 - protein, 56 aa, Artificial Sequence
  Synthetic
AERIEDVVREAEKRLRELLKELEKTSRDLKKRLEELDRELKALVEKVERDLEELRK

SEQ ID NO: 16811 - protein, 60 aa, Artificial Sequence
  Synthetic
SEAEELLRRLKELVDEVLKRLRDMIKRSEDLARDVLRKHEDLIRKLEELMKKVEDLADKI

SEQ ID NO: 16812 - protein, 59 aa, Artificial Sequence
  Synthetic
EEVVREIERIVREVTERLRRLVEENAEVVKRVEKELKELNDELRRVVEEIVRKAKEKTK

SEQ ID NO: 16813 - protein, 60 aa, Artificial Sequence
  Synthetic
SEAEELLKRLEDRAEEILRRLEEILRTSRKLAEDVLRELEKLLRESERRIREVLEELRRI

SEQ ID NO: 16814 - protein, 59 aa, Artificial Sequence
  Synthetic
KEVVDEIKRIVDEVRERLKRIVDENRKIVEDARRKLEKIVKENEEILRRLKKELRELRK

SEQ ID NO: 16815 - protein, 60 aa, Artificial Sequence
  Synthetic
DMRKELEKRVEEIRRAVTELVKRNEDIVREVKKRVEELVKRNEDITKKAEDDIRDLVRKR

SEQ ID NO: 16816 - protein, 59 aa, Artificial Sequence
  Synthetic
EEKLRRLLERLEDIARRVLKYLEEDLRETEKLAKEVLDRARKILEETKELVKDVLEKAR

SEQ ID NO: 16817 - protein, 60 aa, Artificial Sequence
  Synthetic
DMDEELRRVVKEIEDELRRLVEENRDVVRKVEKLNRDLLKRNEDITDEARKRVEDLVRKR

SEQ ID NO: 16818 - protein, 59 aa, Artificial Sequence
  Synthetic
REKLEKLIRRLREIAKEMLEYAKRDIERTKELAKRSLERHKESLDRTEKLVKEVLDKAR

SEQ ID NO: 16819 - protein, 60 aa, Artificial Sequence
  Synthetic
DMVRDLERIVEKIKEDIKELVKRNREVTEKVVRDVEELVKTNREVVREATRRVEKLVEEE

SEQ ID NO: 16820 - protein, 59 aa, Artificial Sequence
  Synthetic
EDTLRKLLKTLRELARRVLEEARKIIERSKELAERVLRYLKRDIEESKKIVKEIEDRAR

SEQ ID NO: 16821 - protein, 60 aa, Artificial Sequence
  Synthetic
DMERELDDVVRKAEEDNRRLLKENEDIVREVVDRNARLLEENRRVVEEAVRRVEDMLRRR

SEQ ID NO: 16822 - protein, 59 aa, Artificial Sequence
  Synthetic
ERKLRKLIDDLRKLVRESLEYNKDDLEKTKELARRSLKYNKEDIDRSREIVRDVRRKAQ

SEQ ID NO: 16823 - protein, 60 aa, Artificial Sequence
  Synthetic
SVIEALEEIAEKIERDVRKLVEENREVVKEAEKRVEEILRTNSKRSEEVRREVEDLVRKD

SEQ ID NO: 16824 - protein, 59 aa, Artificial Sequence
  Synthetic
ERVLEELLRRLEEIAKRALEYLTRDIEETKRLVEEVLKRLKEILDKTDDLAREVLERAR

SEQ ID NO: 16825 - protein, 60 aa, Artificial Sequence
  Synthetic
SEVEKIEEDLKRLVKRLREINEESKKRLEELIRTAEEINKKTTDELERLAEEVDRLVKRV

SEQ ID NO: 16826 - protein, 59 aa, Artificial Sequence
  Synthetic
REAVDRLRRVVDEIRKEARKLNEEIRKRVEDVVRKLDKMDEDLRKRVEEIERKVREATR

SEQ ID NO: 16827 - protein, 60 aa, Artificial Sequence
  Synthetic
SEVEEILERLRRLVKEVDKRNTDSLDTLKRLIDELERKNRDSLRRVDELAKELEKLARRV

SEQ ID NO: 16828 - protein, 59 aa, Artificial Sequence
  Synthetic
KDAVTELEKDVREIKKRLDEMDKRLKDVVDEVRRRAEEVNRRIERLVREIEKRAREEVR

SEQ ID NO: 16829 - protein, 60 aa, Artificial Sequence
  Synthetic
SEAEEVLERLKRLRETVKEENDDSLRKDRELVDRLEKDNRDSLRKLKELIERVREILKRV

SEQ ID NO: 16830 - protein, 59 aa, Artificial Sequence
  Synthetic
KDVVETVKRVVEEIEKELEEANRRLEKSSREVEDRIRKANKRLEEVVDEVREEVDKATR

SEQ ID NO: 16831 - protein, 60 aa, Artificial Sequence
  Synthetic
DEVREVLTRLEELVRRVTKELEDSLRNTERVRRTIRKLAEEVNRDSKRLKDEVKKVLEKI

SEQ ID NO: 16832 - protein, 59 aa, Artificial Sequence
  Synthetic
EEAVETLKRKVEEIERRLKRMVEEDRKTIEEIEEEVRRLVKTNREIIKEIVETLREAVR

SEQ ID NO: 16833 - protein, 60 aa, Artificial Sequence
  Synthetic
KEVEEVRTRLKKLRDDVKRLLDEVNEESKRLAEEVRRRLEESNRNTERVVEEIERVIERI

SEQ ID NO: 16834 - protein, 59 aa, Artificial Sequence
  Synthetic
DKVVDEVRRRVEEAEREVKDMVRTNNEIVRRIVEEARRLVDEDRDRIKKIEERLRRELQ

SEQ ID NO: 16835 - protein, 60 aa, Artificial Sequence
  Synthetic
SEAEEVLREVDELAKRLERVATESLKNTKKVVDDVRREVKRVNERSEEIMRRIEDVLRKI

SEQ ID NO: 16836 - protein, 59 aa, Artificial Sequence
  Synthetic
EELIREIERIVREIDKRARELVERDNREVERIVEELKELVKTNNDIVRRVVEKLKETVR

SEQ ID NO: 16837 - protein, 58 aa, Artificial Sequence
  Synthetic
SEAEKILEDLKRIVRRIKEELRRVLDHTRELVERIRRLAKKILDDTEKIVRDIRDKAE

SEQ ID NO: 16838 - protein, 59 aa, Artificial Sequence
  Synthetic
EDVVRELKREVERIKREVKKMVDDNRRTVEKIKRDAEKMVRDNEELSRRIEKDVDDKTK

SEQ ID NO: 16839 - protein, 58 aa, Artificial Sequence
  Synthetic
SEAEKIEERLKRVVEKLRRDATRVRKHTDDLVKEITDLAEESKRRVEEIRERVKRLRE

SEQ ID NO: 16840 - protein, 59 aa, Artificial Sequence
  Synthetic
EKVVKRLEDEVKRIKDEAKEMVDENKRKVDEIRKELRRLVEENRRESEKIKKKLDEDLK

SEQ ID NO: 16841 - protein, 58 aa, Artificial Sequence
  Synthetic
DEIREILRRIREVVADATRRAKESLDNLKRVVEEVDRRVKESLDRLKEIVDRVRELSK

SEQ ID NO: 16842 - protein, 59 aa, Artificial Sequence
  Synthetic
KDVVKRVEDEVRDIRRVLEEMVRRDKKVVDEIRERLKEAVRRNEEVSRKIKKDLKDETK

SEQ ID NO: 16843 - protein, 57 aa, Artificial Sequence
  Synthetic
SMEERLREVVTEIRKKVEKLLRDNRKSNKEIKETVDDLVRRNRELTERAKRRVDARG

SEQ ID NO: 16844 - protein, 59 aa, Artificial Sequence
  Synthetic
EREAEELLRELADVVRRAEELAERSLRESEKVMEDITREAERILRDTKRLIEEIERRAR

SEQ ID NO: 16845 - protein, 57 aa, Artificial Sequence
  Synthetic
SLREDLEKDVRDIVREIDEAVERNRRSVEEVDKRVEDMLKNNRDSNKKIEEDVRRAG

SEQ ID NO: 16846 - protein, 59 aa, Artificial Sequence
  Synthetic
EEDAKRLKDELREVVDKIRRDLKKSNDDIRRLVEKIKRELEELNKRSRELVERARETVR

SEQ ID NO: 16847 - protein, 57 aa, Artificial Sequence
  Synthetic
SLEETIEEKVRRIREEVRRMLENNRRINEEVDRRVTEMVERNRKTVEEVVREVDRDG

SEQ ID NO: 16848 - protein, 59 aa, Artificial Sequence
  Synthetic
EEDAKRLLEEVEDIVRRLRKELEDSNRKSRKLVEEIRKRAEESNRELRELIKRIKDRAR

SEQ ID NO: 16849 - protein, 56 aa, Artificial Sequence
  Synthetic
DVLERLAEVVRRVVKEAEDLVRNNRRLNKEVEDEVDELVRNNRRLTKDVVKKVEDA

SEQ ID NO: 16850 - protein, 59 aa, Artificial Sequence
  Synthetic
KEEVKRLEDELRKVVDKVRKDMKRSNDDSERLREDITRKAKRLNEETRKVMEDVTRRAT

SEQ ID NO: 16851 - protein, 60 aa, Artificial Sequence
  Synthetic
KEAEELIREIERKAEEVRKENERSIRENERLAREVEKRLKRTNEELKRLVRELEEKLKRD

SEQ ID NO: 16852 - protein, 59 aa, Artificial Sequence
  Synthetic
EELIRRLEEVVKRIREDLKKLDDDLKRSVEEIERRLKKVIEDNRETLERARRRLDERVK

SEQ ID NO: 16853 - protein, 60 aa, Artificial Sequence
  Synthetic
DEAEEILEELRRLIEEDKKTVEEVLRRDEETIKRLEEENREALKDNRRLIEELEDIVRRI

SEQ ID NO: 16854 - protein, 59 aa, Artificial Sequence
  Synthetic
EKVREKVERILDDLRRVVEETVKRAEDLLRKSREVVKRVDEELKESHDRLDERIKRDLK

SEQ ID NO: 16855 - protein, 60 aa, Artificial Sequence
  Synthetic
DEAREILKTLKDLIKELEDRNREVLERDKKTIEDLERRNARVLEENKKLIDEIRRIAKDI

SEQ ID NO: 16856 - protein, 59 aa, Artificial Sequence
  Synthetic
RSVEEALKKILRELEKKVEEVDRRLKRILEDSRRVVRRVDEEARKSHEELKRELDRIRK

SEQ ID NO: 16857 - protein, 60 aa, Artificial Sequence
  Synthetic
KEAEDLLRKLRELIKKLDDTNRRVLERDRKTIEELERRAEKILTDIERLIRELEDRVRRT

SEQ ID NO: 16858 - protein, 59 aa, Artificial Sequence
  Synthetic
EKVVEKARRILKELRDRIREVDKRLRELLEESRKRVEEVERELERLVRELEKKVREAEK

SEQ ID NO: 16859 - protein, 61 aa, Artificial Sequence
  Synthetic
SEVEDVVRKIKEILERLKKEVDDVLDRNRKLLEELKKRADEVLKRNKDLLETLKREADRDG

SEQ ID NO: 16860 - protein, 56 aa, Artificial Sequence
  Synthetic
KDELKRLLDELREIVKEAEERLRKSDEDLERIIREVKKRLKESNEELERTIREVER

SEQ ID NO: 16861 - protein, 58 aa, Artificial Sequence
  Synthetic
REVEEVVKEAEDLLRKLRELAKEFLTRHKKLIRDVTEKVKEVLKRSADSIRELEKIID

SEQ ID NO: 16862 - protein, 59 aa, Artificial Sequence
  Synthetic
EDAVRKLEEMVERLARIVEDVERKLKKLNKELEEIVRDAKRRLERLNEELRRRIREAER

SEQ ID NO: 16863 - protein, 58 aa, Artificial Sequence
  Synthetic
DEDEDIERKLKELIDRLREEVKKAEDEHKELIKRDHRRVEEVERRSEKSIKDLRDLAK

SEQ ID NO: 16864 - protein, 59 aa, Artificial Sequence
  Synthetic
EDVARRLEELVEELEDIVRKVKESLRRLNEELRKNSETVKKKLEDLNRELRKDIEEKRR

SEQ ID NO: 16865 - protein, 58 aa, Artificial Sequence
  Synthetic
SEAEKVLEEAKRLIEELERRVREVLKRSKKTIEDLRREVDRVVKEHKKLIRELREIIK

SEQ ID NO: 16866 - protein, 59 aa, Artificial Sequence
  Synthetic
EEVAKRLKDVLRELKDLVEKIEEEARRLNEELKEIIDRARKTLEDLNRELEEVVRRARK

SEQ ID NO: 16867 - protein, 59 aa, Artificial Sequence
  Synthetic
SEVDEVRRELERVITDDKRLVDESRRKNEKSIRDDEELIKTSRRINEESIRRLKELVER

SEQ ID NO: 16868 - protein, 56 aa, Artificial Sequence
  Synthetic
EETLRRLVKRLDETSEELEDENRRLNETLKRSSDELRKTNEELNKRLKEVVDRAKK

SEQ ID NO: 16869 - protein, 61 aa, Artificial Sequence
  Synthetic
SVEEKIKEMVDKIKDSVRRSTEENDRLVKEIDKVLKEAEKRNRDLLKEAADVLKRVLDKRR

SEQ ID NO: 16870 - protein, 56 aa, Artificial Sequence
  Synthetic
IDTVLKDMKKILDDNKKLVDDSRKKHKESIDRLRKLVKDSLDEHRESIERLERAAR

SEQ ID NO: 16871 - protein, 60 aa, Artificial Sequence
  Synthetic
REVEELERELEESNKELRKLIKELDDLLRETNKRLNDLIRELKERLDRVLEELRKIIKDD

SEQ ID NO: 16872 - protein, 59 aa, Artificial Sequence
  Synthetic
REVEKLVEEAIKRNEDLVRTVERKVDEAIKENRRSVEKVAEEVKKAEEELERIVDTVRR

SEQ ID NO: 16873 - protein, 60 aa, Artificial Sequence
  Synthetic
REVEELKKEADKTNEDLNRLIKELEERARESNRELKRLIDELRRRLEEVLKRLKDIIDKE

SEQ ID NO: 16874 - protein, 59 aa, Artificial Sequence
  Synthetic
EEVERLVTEMIKRNRTSVDAVRRKVKEMIDRNKALVETVRDEVRRAREKLRDILRKAEK

SEQ ID NO: 16875 - protein, 59 aa, Artificial Sequence
  Synthetic
SIEEIVRKVKEDLKRSLDELRKVSEDMARRLRESLKELEEVVREMEERLKRILDDIRRK

SEQ ID NO: 16876 - protein, 56 aa, Artificial Sequence
  Synthetic
ERDLKRRVDEVLTRSKESVDENKRTADRVLEESRESIKELKERAKRLLERLEEERK

SEQ ID NO: 16877 - protein, 60 aa, Artificial Sequence
  Synthetic
KEVEELEREARRMLEHTKRLIDEVRDRAKKSLDNTRRVDREVEKLVEDTERRLDELRKRG

SEQ ID NO: 16878 - protein, 59 aa, Artificial Sequence
  Synthetic
EELKRTAERMIEENRRLVETLKRVLEEAIRRNEELVKTLLRKLEESDKKIRKLIEETRT

SEQ ID NO: 16879 - protein, 60 aa, Artificial Sequence
  Synthetic
SELEELRDRLKEILEHTKKLIKESVERLEESLRNTRRVIRKVEEEVERTRTKLDDLRRRG

SEQ ID NO: 16880 - protein, 59 aa, Artificial Sequence
  Synthetic
EEMADVARRVIEENKRLVEENEDRLRKAIERNRELVEEVKKRLEDSDREIERLIREVKK

SEQ ID NO: 16881 - protein, 60 aa, Artificial Sequence
  Synthetic
DEVETLRREARKLLERIKREIEEVRRRLKESLDNTKRVEDEARKLVKETKDKLKRLAERG

SEQ ID NO: 16882 - protein, 59 aa, Artificial Sequence
  Synthetic
EEMRKVAEDMEREIRRLITDLRRELEEAIERNEELVRRLARELERSDREIKKRIDEIET

SEQ ID NO: 16883 - protein, 60 aa, Artificial Sequence
  Synthetic
SELDELRKRAKRSLETTEELIRRSRKLMRESLDNTRRVEEKVRRLVEKTLRDLEDLKRRG

SEQ ID NO: 16884 - protein, 59 aa, Artificial Sequence
  Synthetic
REMEETAREAIERNRKLVEDNERDLKKAIEDNEKLVRDLKRELERSDEEIKKLIREVKN

SEQ ID NO: 16885 - protein, 60 aa, Artificial Sequence
  Synthetic
DSREELRREAKRLLDDIKRLEEKVERLAREVLKHTEELDEKLKRLVEETLKKLEDLRRRG

SEQ ID NO: 16886 - protein, 59 aa, Artificial Sequence
  Synthetic
EELKRTAEEMERRIRELIKRLKDRLEDMIRRNKELVDRLKKKAERSDEEIERLIRETKK

SEQ ID NO: 16887 - protein, 60 aa, Artificial Sequence
  Synthetic
KEIEDVVRELERKVRENKRRNDEVIKRLERLVEKNTELVRRLIRTLEKLVEDLEDIVRRI

SEQ ID NO: 16888 - protein, 59 aa, Artificial Sequence
  Synthetic
EEAKKVAEDVERRIRRSVEEARRLLEEVKRKMEESVEESKRLLKKVEDEAKDVVDRARK

SEQ ID NO: 16889 - protein, 60 aa, Artificial Sequence
  Synthetic
SEIDKVIEELKDLVRKNEKRNRDVVRRDDKSVKDNTKRVEDVIRDLDRLIRELREIVERI

SEQ ID NO: 16890 - protein, 59 aa, Artificial Sequence
  Synthetic
KRAAELAKEVIDRMEESVKEAERLLRELKRKSEDSVRKSKELLDEVEKKVEEVVREAER

SEQ ID NO: 16891 - protein, 60 aa, Artificial Sequence
  Synthetic
EEIERAIEKVEREIRELEERVREIIERDRKSVEDNSRRVRTVIKELEKLVEELRKTVKDI

SEQ ID NO: 16892 - protein, 59 aa, Artificial Sequence
  Synthetic
EEARKLAEELRKEIKRVVDEVRKLLRDLERKSKESVREAEELLKRVRDELKEVVDRTEK

SEQ ID NO: 16893 - protein, 56 aa, Artificial Sequence
  Synthetic
SLREAVERLRKRHEDVVRELEKLVRRVKEELERVNKDLRKVVEEVRRRLEKVLEDA

SEQ ID NO: 16894 - protein, 55 aa, Artificial Sequence
  Synthetic
TDLLKRADDNVKRNRDLIRRLKEKADEIVKRNEDLIEDARRKADEMIKDLEEKAR

SEQ ID NO: 16895 - protein, 59 aa, Artificial Sequence
  Synthetic
SEVDELRERAKRIVDDLRRKIEEVVKRLEDSDEENKKLIEKAVRELEKIIRDLEEVIRR

SEQ ID NO: 16896 - protein, 59 aa, Artificial Sequence
  Synthetic
RELKELVDRLDKEATDVLRKVREDLRKAIERSERSHRRLEKLIEEIERELKRVVDEVTR

SEQ ID NO: 16897 - protein, 57 aa, Artificial Sequence
  Synthetic
DIEELLRKVAEEITRSVKESRDRLDEVEKKAREVVERSEKRLREVEEKIERVVRRIV

SEQ ID NO: 16898 - protein, 59 aa, Artificial Sequence
  Synthetic
EEDADKVLKEAEELVRRNRRLVEEVLRRLEEIVKRDEDLVRKVLKEADEIVRRLEEAAR

SEQ ID NO: 16899 - protein, 59 aa, Artificial Sequence
  Synthetic
SRVEDVVRRLKELNDENSEDSRRVLEKLKDEVRKNSDEIEKAAEELKEKLTRLKRLIEG

SEQ ID NO: 16900 - protein, 59 aa, Artificial Sequence
  Synthetic
KEVKELVKRVRETSKKSLKEDEDMVREVKKKLDDSLRRVDELVRRVEEEARRVLEEVKK

SEQ ID NO: 16901 - protein, 59 aa, Artificial Sequence
  Synthetic
DEVERVVKELRDKVDRNSREIEKAVTELRKIVKRNSDESKEVIERLEELLRRLEELIKS

SEQ ID NO: 16902 - protein, 59 aa, Artificial Sequence
  Synthetic
SRVKTLVDEVRKRAEDSLDTVKKLVDRVRERLDESLRDDKRLVDRVREEAERVVREVEK

SEQ ID NO: 16903 - protein, 60 aa, Artificial Sequence
  Synthetic
SDVEKIFDELRKLLEDLRRKVEEVFRRLKELVERNTRLNREVVKELKKTSDDLRDMVRRT

SEQ ID NO: 16904 - protein, 59 aa, Artificial Sequence
  Synthetic
EKVRKLVKEIRERIEKVLRDAEELLKEIEERVKESKKEAKKLLDEVRESVDDVKRKAEK

SEQ ID NO: 16905 - protein, 60 aa, Artificial Sequence
  Synthetic
SDVEEIVRKLDKLVEDNTRENEEAFKRLDETSKKLEEEVERVFRELKKLVDDLEKIIRDI

SEQ ID NO: 16906 - protein, 59 aa, Artificial Sequence
  Synthetic
EKVRKLVREVEKKVDESTERAERLLKRVEDSVRDVLRRAKELLDEIRKRVKDVERKAEK

SEQ ID NO: 16907 - protein, 60 aa, Artificial Sequence
  Synthetic
DEAREIRRRLKEVVDEVRKRLEDSLEEIDRRAKEVLEKVKRSLDRLRKVAEEVLDKLRRK

SEQ ID NO: 16908 - protein, 55 aa, Artificial Sequence
  Synthetic
ERVKRRVDEVVRKLREIVRKLTEENKRTVEDLERIVERLDRDNRKMVEDMEREVK

SEQ ID NO: 16909 - protein, 60 aa, Artificial Sequence
  Synthetic
REVEELKKRLEKIVEELKRIVDDHKRKVERIVEELEKLVEDHKRTVEEIVERAKRIVEKD

SEQ ID NO: 16910 - protein, 58 aa, Artificial Sequence
  Synthetic
ERLEEVAREIEEALKKVKRDLKESNRELEEVADRVRKELDRSDEDLERRMREVREELK

SEQ ID NO: 16911 - protein, 56 aa, Artificial Sequence
  Synthetic
SVLETLAERVKEVKDNLRKLVEDLKRLVDRIKETLDKLVEELRELVERLDDRLRKN

SEQ ID NO: 16912 - protein, 62 aa, Artificial Sequence
  Synthetic
RDLLKRLEEIMRRLEKEHKDVSKLLRDIEREIDRVHREVKRKIEEIVRKVRKSLEEVKRRAK

SEQ ID NO: 16913 - protein, 57 aa, Artificial Sequence
  Synthetic
SRAETVLKEVTDKIKKLKDSSDELLRRNKENIDELKKSSEELLRRLTKAIEEIEKAN

SEQ ID NO: 16914 - protein, 56 aa, Artificial Sequence
  Synthetic
DEVVKRVRDLLDTVRRRNEKVNEDVKRMNDKLRRDNEDVIRRVEKLLRELEEKRRT

SEQ ID NO: 16915 - protein, 59 aa, Artificial Sequence
  Synthetic
DLEEVVKEARRLLDTVRKKLDESIKEARELLREIEERFKKSADEVREELKRVEDELRRK

SEQ ID NO: 16916 - protein, 56 aa, Artificial Sequence
  Synthetic
VRELRKEVEDIIRRLDELVKKNTEDNRRVIKELRELVEEHTRRVKKIIEDLEREVR

SEQ ID NO: 16917 - protein, 60 aa, Artificial Sequence
  Synthetic
SVEEVVEEAKELLKEVEEELKRSAEEAEKLLRDVARKMEESVERLRRLLKDVERALREKN

SEQ ID NO: 16918 - protein, 56 aa, Artificial Sequence
  Synthetic
LRRLREKIEEIVRRLRELVRRHNEEVRRIIETLEELVRRNTETVEREVRRLRDEVR

SEQ ID NO: 16919 - protein, 59 aa, Artificial Sequence
  Synthetic
SVEKVLEDARRLLEEVKDRLKKSIDDAEKLLRELEKRLRESADEARRLLRRVKELLERK

SEQ ID NO: 16920 - protein, 56 aa, Artificial Sequence
  Synthetic
LRELKREIEEIVKRAEDLVRENTEKNKRVVDTVEELVRRHNEEVRRVVKELEERVR

SEQ ID NO: 16921 - protein, 59 aa, Artificial Sequence
  Synthetic
GLDEIIKRLREVLEKIREELRKSSEELERLLKRVDDDLERSNKELEELLERVRKKLEDS

SEQ ID NO: 16922 - protein, 59 aa, Artificial Sequence
  Synthetic
EELLRELEKEIKRVDEDLKRLVEEHEELVRDVLRKLEKLVREHKEKVRERVERADDKVR

SEQ ID NO: 16923 - protein, 59 aa, Artificial Sequence
  Synthetic
SLEEVLKELKKIVEDVTRRLEEMLRESKETSKEVEKELKKLDDEIREIIERAEEDLRRA

SEQ ID NO: 16924 - protein, 56 aa, Artificial Sequence
  Synthetic
EEILKEVAERLKKTAEEVKRELEKFIEDDRKRADEVRRENEETLKRIEDIVRELKR

SEQ ID NO: 16925 - protein, 58 aa, Artificial Sequence
  Synthetic
SALEKIMKDLEKSIEDVRRKLEDILRKLRKSSEEVKRRIEDIERKVDRAAKEILRSKG

SEQ ID NO: 16926 - protein, 59 aa, Artificial Sequence
  Synthetic
EDVVRRLKRTVEEVHKRNEDVVREAEKLVEKLSRINEEAVRRLADIVRRLEEELRKAEK

SEQ ID NO: 16927 - protein, 57 aa, Artificial Sequence
  Synthetic
REKEDVLRRIERIVREIERRLRESLKRNREIVKDLERLARRVLKESEDNLRKLKEDR

SEQ ID NO: 16928 - protein, 56 aa, Artificial Sequence
  Synthetic
REKLRKRLEEMKEELRKADERAKEIDTRTKRLVDEAVRKLEKLVEEHRRMTDEIRR

SEQ ID NO: 16929 - protein, 63 aa, Artificial Sequence
  Synthetic
REDETLEKILRRIEEIVRRLVREAEDVVRRDRETIERLVRENEKAVKEIKDIVDELTRLKKDK

SEQ ID NO: 16930 - protein, 58 aa, Artificial Sequence
  Synthetic
ESVREAAERLKDILRRLEELLRKVAKDLKKSNDELERLSEESVRRLREILKRLEDALR

SEQ ID NO: 16931 - protein, 60 aa, Artificial Sequence
  Synthetic
SEVEKILEDLDRSAKEAADRIKEIVDRLTELVKDLKKKNEESLEELDRLVKELADLLRRG

SEQ ID NO: 16932 - protein, 59 aa, Artificial Sequence
  Synthetic
EDKLRDIARRVREVNKRLEDLIRTVARAVRKALKDSEDLVREIAKRVEKALEDVRRAAK

SEQ ID NO: 16933 - protein, 58 aa, Artificial Sequence
  Synthetic
REVEEVIRKLERILEEAERMSRESERKLREILEKLERAIREIREELERIHKELEEKAG

SEQ ID NO: 16934 - protein, 56 aa, Artificial Sequence
  Synthetic
RDRLDKAVEELRKEIEEMLRRSDELVKRLDEKVKKVLKELREHVKRDKEKVDKDAE

SEQ ID NO: 16935 - protein, 58 aa, Artificial Sequence
  Synthetic
SSRERVIKKLEESLERLERLARKIKEDLERINRDLERLARKVEEELKRIHEELERRSG

SEQ ID NO: 16936 - protein, 56 aa, Artificial Sequence
  Synthetic
EDELDKRVKDLHRENEREIRRLEDHVRRDRERLEEALRDLEAHVKRDKDKLDKDAK

SEQ ID NO: 16937 - protein, 56 aa, Artificial Sequence
  Synthetic
SEIEDVARRLEEINKKSEDMARRIKEELEKVDEESERLVREVAKRLDEVLKRVRDD

SEQ ID NO: 16938 - protein, 56 aa, Artificial Sequence
  Synthetic
AEELKKRVEDLKRKNEDLIRRLEEKVRRLKKRNRDLIEELKKLVKELKDEAKKTSD

SEQ ID NO: 16939 - protein, 56 aa, Artificial Sequence
  Synthetic
SEEERIEKRLREIHERHKRMLDEIKKRLDDSLKTLEDLIRDVTRELEKVLKKAEDD

SEQ ID NO: 16940 - protein, 56 aa, Artificial Sequence
  Synthetic
AEDLDREVKRLEREIERSIKELEELVRKLHKENEELIRELEELVERLKRKIDETSR

SEQ ID NO: 16941 - protein, 60 aa, Artificial Sequence
  Synthetic
SEVEDAERVVRELEREVREEVKKLRKHVKETRDRDKDTVRRVEEKVKRLREKVKRVEDAR

SEQ ID NO: 16942 - protein, 58 aa, Artificial Sequence
  Synthetic
RAVREVLKELERVLRDAKRELDRVREEHERSHKELRDMLDRVKKELEKILEKLERALR

SEQ ID NO: 16943 - protein, 56 aa, Artificial Sequence
  Synthetic
EDKERVEEKIKRSLEEARREAERVRDKLRKSEEEIDRVMKRVLAEIDRVLKEVKEA

SEQ ID NO: 16944 - protein, 56 aa, Artificial Sequence
  Synthetic
SKELEDIVRRLEERNRRTVEEVERLVDEHNKRLREAAKELKKLVDDLERKLREDTR

SEQ ID NO: 16945 - protein, 56 aa, Artificial Sequence
  Synthetic
SEIEEVKKKLEKILRDHNRVVEEVAKEHEKILRDHNRVIREVKEELDRVLKKLRDD

SEQ ID NO: 16946 - protein, 56 aa, Artificial Sequence
  Synthetic
AEKLERLVKRIKEEVEESVKRLKDHAKENREDVKRSVEELRDVVRRLEERIKESAD

SEQ ID NO: 16947 - protein, 56 aa, Artificial Sequence
  Synthetic
SEIEEVARRLDEILERHNDVLRKVKEKHEEILRRHRKRVREVEEELKKILKELREK

SEQ ID NO: 16948 - protein, 56 aa, Artificial Sequence
  Synthetic
AKDLKRKVDELRRKAEESMKEVERHVRENAEHVKRSVEELEEDVRRLRKKLEEKER

SEQ ID NO: 16949 - protein, 56 aa, Artificial Sequence
  Synthetic
DEKEKVKEDLDRILEEHRREVEDVERKHRKILKDHEEVVRRVREEHEKILKRLKDN

SEQ ID NO: 16950 - protein, 56 aa, Artificial Sequence
  Synthetic
AKKLEDLVRRLKEHVDRSRERLEKHLRENKRHVEESAKRLEKHVRDNEEDVKRKST

SEQ ID NO: 16951 - protein, 60 aa, Artificial Sequence
  Synthetic
KEEEDLEREVKRLEDKVREDAKKLEEVVKTVEKLVRDDARRNEEVVKEVADRVRRLTERK

SEQ ID NO: 16952 - protein, 55 aa, Artificial Sequence
  Synthetic
EDVIRKMEEIIKRLEEVSREVEKRLRRIIRELERVSKEVLDRLREIIEKLDRDAT

SEQ ID NO: 16953 - protein, 56 aa, Artificial Sequence
  Synthetic
SVEDDVRRKLKEIEDEHRKVVKDARDELEKSHRRLRKVIEDVKRKLDRVLEELERS

SEQ ID NO: 16954 - protein, 56 aa, Artificial Sequence
  Synthetic
EKDLEEVIRRIRKKVEDSKRDLERLLEKSKRDVEEVMKDLKRRIEELEKLVRDETT

SEQ ID NO: 16955 - protein, 59 aa, Artificial Sequence
  Synthetic
SLKDELEKLLKELKEHVDRSEKKARENLKRLEEHVRKSKEELEDRLRRIEEKVKRLTES

SEQ ID NO: 16956 - protein, 59 aa, Artificial Sequence
  Synthetic
EEMVERAIRKLEDIHRRHREVVERVEREHRRIKEEHEKVVREAEETLKRIIEDLRRSAD

SEQ ID NO: 16957 - protein, 59 aa, Artificial Sequence
  Synthetic
KLEEEARELLRRLEEHVRKSKKEAEDNLRRLEKHVEDSKRRLKELLDRLRKTVEDLKRA

SEQ ID NO: 16958 - protein, 59 aa, Artificial Sequence
  Synthetic
EDVVRRAADALRRVHEAHKRMVEEVKRRHDEIHKRHEKVVRDAERALREVLKRLEEAAR

SEQ ID NO: 16959 - protein, 56 aa, Artificial Sequence
  Synthetic
SLRETADKRLRDVNRDLKRVIEELRERLKESNKKLEDLIRELRERAERILDDLRRS

SEQ ID NO: 16960 - protein, 60 aa, Artificial Sequence
  Synthetic
EEDLARRLEEIVKESKEIVDRARRRLEEIVERSEDRVRRVEERIKELVKRLEDIVRREKT

SEQ ID NO: 16961 - protein, 60 aa, Artificial Sequence
  Synthetic
KEIEEVLRRLEELIRRVREELRKNNEDIEREADKLRKELKRVNDELEKKIKDVKDRARRD

SEQ ID NO: 16962 - protein, 59 aa, Artificial Sequence
  Synthetic
KEVLDELRRVVEEVTREIREVLETSRELVRRIVETVKEVLRSHDEKIKKVEEELDRDRQ

SEQ ID NO: 16963 - protein, 57 aa, Artificial Sequence
  Synthetic
DVDEKVRELLRKIEEDLRRSVKELRELAKRIEEDLRRISKKSKDLLKKIKDDVKRAG

SEQ ID NO: 16964 - protein, 56 aa, Artificial Sequence
  Synthetic
EEDLKRVIEELKKEVEELHRRNEKIIRELEDKVRRVREDNERVIEELARDVERAER

SEQ ID NO: 16965 - protein, 59 aa, Artificial Sequence
  Synthetic
SLREEAEKIIRDLEDHVRRDEERVKEMVDRSRKLVKELEKRLRDLIREITRRVDKLRKD

SEQ ID NO: 16966 - protein, 59 aa, Artificial Sequence
  Synthetic
EKVLRKAEELLKRIIAELKKIHEELRRLSKESKERLERILDEARKMLEEVKKRLEDIEK

SEQ ID NO: 16967 - protein, 59 aa, Artificial Sequence
  Synthetic
SLEEKLEKLLKELRDHVRRDKKEVREALERLKDHVRKDREKLERAIAEIKKAVEKLKRD

SEQ ID NO: 16968 - protein, 59 aa, Artificial Sequence
  Synthetic
EKVLRKLEKAAREVAEAVKKVHEELKRALEEIRRELEDINRKLKEAADEVRKKLRDIAE

SEQ ID NO: 16969 - protein, 60 aa, Artificial Sequence
  Synthetic
SLEEELREVIKRLRDHVRRDKERAKEAIKRAEDHVRRDEEAVEEVIKELKRLVDELRKAK

SEQ ID NO: 16970 - protein, 59 aa, Artificial Sequence
  Synthetic
EDVLRRATKALEDIRRELEKINEELKRAAERIEKRLKEIHDRLKKALDDVRRELEETRR

SEQ ID NO: 16971 - protein, 59 aa, Artificial Sequence
  Synthetic
SLKEKLEREIERLRKHVEDDERRLREVIRRLEEHVKRDEDRLKKELDRLREEVERLRRA

SEQ ID NO: 16972 - protein, 59 aa, Artificial Sequence
  Synthetic
EEVLKEAEDLLRDVTRALEEVNRRARKLLKEIKEKLDEIHKRLNKMLEEVKRRLDEIRR

SEQ ID NO: 16973 - protein, 56 aa, Artificial Sequence
  Synthetic
SRAEEMIKDVRRIVEEVRRENKRVLEEIEEIIKRSKEEWEKILKELRDIIEEVERR

SEQ ID NO: 16974 - protein, 59 aa, Artificial Sequence
  Synthetic
EELLRRIKEVVDRARDTLRRLDEELKRIVEAVHDTDDKVKKELEKIVREVEEIARRRSK

SEQ ID NO: 16975 - protein, 57 aa, Artificial Sequence
  Synthetic
SEAERVVRENEENLERIKREVERDLRRNEEVLEDLRRKVKKVLDEIRETLRRLREAK

SEQ ID NO: 16976 - protein, 59 aa, Artificial Sequence
  Synthetic
EEAVRKLDDLDRRLEEIVRRASEALKRSLEEIERILRKAEEDLRRLLKRLEEIIREVER

SEQ ID NO: 16977 - protein, 60 aa, Artificial Sequence
  Synthetic
SVEDTLREMLKRLEEIVRRAEETLKRLNEEIERVVREAARRLDKLNKELRDIVRDIKRRK

SEQ ID NO: 16978 - protein, 56 aa, Artificial Sequence
  Synthetic
KDDLKRRLEEILKELKRIVDEAEERHREIIKRLRDIVREATEKSREVLKRLEDKAK

SEQ ID NO: 16979 - protein, 60 aa, Artificial Sequence
  Synthetic
KVREKLERALRRSTTSSRDIERRLKELLDTNREIVDRIVKRLKEMLDRLREEIRRIEERR

SEQ ID NO: 16980 - protein, 59 aa, Artificial Sequence
  Synthetic
DELVKRLEDDLRRWEKESKEIVDRVKEEIDRVNRESKETLKELEKEAKRVLDELERDER

SEQ ID NO: 16981 - protein, 60 aa, Artificial Sequence
  Synthetic
DVERTLDEMLKRSEDVTDEVREELKRALESNNKLIKEIVDTADKVLKDIEDTVRKIIEKK

SEQ ID NO: 16982 - protein, 59 aa, Artificial Sequence
  Synthetic
EKLVKEVEDRARKWLKDLRDKIERLREELEKVNRDTERILEKVERDLRRLLEEVRKRDR

SEQ ID NO: 16983 - protein, 56 aa, Artificial Sequence
  Synthetic
DEVEKVLREIEEIIKELKKEVDKDLEELKRTIERLKKKADEVVKRNEEVIRTLREG

SEQ ID NO: 16984 - protein, 59 aa, Artificial Sequence
  Synthetic
KEAADKLRELLKRLEEVVRRWKEAIEDINRKLEKVVRDIERLLRDLDRKAREVLERLRK

SEQ ID NO: 16985 - protein, 56 aa, Artificial Sequence
  Synthetic
SSVEKVLRELDDLIRRNRDLVEEDRKELKRTSDENRERVERIVRKNEKAIRDLRRN

SEQ ID NO: 16986 - protein, 59 aa, Artificial Sequence
  Synthetic
KKAADDLKRVLDKLRKSHREWNELIKKANKENTEILREAEERLRELDRRLRKVLEDLRR

SEQ ID NO: 16987 - protein, 60 aa, Artificial Sequence
  Synthetic
SEVERVLKELKELLDRLRELVEEILRRLEKIIKETKREIEESLRTLEEIIRRLEELAERV

SEQ ID NO: 16988 - protein, 58 aa, Artificial Sequence
  Synthetic
DADRALRKVLEDIKEIVKKAKEDLERVYKKHKKLVDEVKKAHEDVLKKAREVLEEIRR

SEQ ID NO: 16989 - protein, 60 aa, Artificial Sequence
  Synthetic
DEVEDVLRKIKEIIKRTEDKVRESLKTLKEIIRRTKEEVKKILKEIKELIERVEREARRV

SEQ ID NO: 16990 - protein, 59 aa, Artificial Sequence
  Synthetic
ERAETKLRELYERHRKVIKEVRERHKEVHKRHRDVLEEIRRRLEKLLKDLEDVIREIER

SEQ ID NO: 16991 - protein, 56 aa, Artificial Sequence
  Synthetic
DEEKDVVRRLKRNVEENTKNVERMVRELERNIRENTENAKEVITRLKKIIDELRRR

SEQ ID NO: 16992 - protein, 55 aa, Artificial Sequence
  Synthetic
EDVKRVRKLARESLERVRRLHREVLEKLKKSHDDVKRLHEEIDERAKRVVEEREK

SEQ ID NO: 16993 - protein, 56 aa, Artificial Sequence
  Synthetic
DAEELLKEIERELKRSIEEARRLLEEVEKRLRKSKRDVEKLLKEVREKLEKVVREI

SEQ ID NO: 16994 - protein, 59 aa, Artificial Sequence
  Synthetic
RDVVRRLVEEARKLVEENTRENRDMIEKLRRLVKRHSEEVEEIIRRLDKLIDDVRREAE

SEQ ID NO: 16995 - protein, 59 aa, Artificial Sequence
  Synthetic
SLEELLREVERRLRELNKKLEDMIREVEERLRKVIRETEKLIEDVKRELEKILEKARER

SEQ ID NO: 16996 - protein, 56 aa, Artificial Sequence
  Synthetic
EKELEKEVRDDLRRTDEDIRRLLDEARKDVERHKEELKKLLEDAKRLLERVERTIR

SEQ ID NO: 16997 - protein, 57 aa, Artificial Sequence
  Synthetic
RELEEVVKKVREEVKEHTEKVKRLVEEAEELNRRYEEEVKKLVTTAKRLNDEARKRN

SEQ ID NO: 16998 - protein, 56 aa, Artificial Sequence
  Synthetic
KELLDEVAKLVEESLRRLDRLLEEIKRTSDELIEKNERLNRELNKTSDKVVEDMRR

SEQ ID NO: 16999 - protein, 60 aa, Artificial Sequence
  Synthetic
SLEDLIREVEDRNRKSVEEVERLLEEVRRKLDESRKRLEELLKRVEEKLERVIEEAKRRL

SEQ ID NO: 17000 - protein, 59 aa, Artificial Sequence
  Synthetic
EKVVEELAREMKKSVEEHTREVRRMVAELEKLVKRHTEEVERAVREAEKLVETLREELR

SEQ ID NO: 17001 - protein, 60 aa, Artificial Sequence
  Synthetic
SLEDLIREVEKRNKESVDTARRLLDEVRKKLKDSIDRSRKLLEEVRRKLEEVIKDAKRKL

SEQ ID NO: 17002 - protein, 59 aa, Artificial Sequence
  Synthetic
ERVVEEIMRRLEKSVERHTEEVKRVVREAEELVKDNTRKVEELVRRAEKLVEDLERRTR

SEQ ID NO: 17003 - protein, 60 aa, Artificial Sequence
  Synthetic
SLEELIREVEERLRKSVDDSRKLLEEVKRKLEDSKREVDRLIEEVKRELERVIEDVTRKL

SEQ ID NO: 17004 - protein, 59 aa, Artificial Sequence
  Synthetic
EKVVKELADEMRKLVRTNTEIVKDVVKKLDELVERNTRTNRDVVRRARELVEELERRER

SEQ ID NO: 17005 - protein, 57 aa, Artificial Sequence
  Synthetic
RELERVVEEARRLVEEHTEEIERSADKARKLNEEHSRRVDEIFERLERLIREAEKKN

SEQ ID NO: 17006 - protein, 56 aa, Artificial Sequence
  Synthetic
RELLEEIRKLVEESVERVKRLNEDVNRTSKESVKRLEDLVDEIRKRVEEVVRRLKK

SEQ ID NO: 17007 - protein, 56 aa, Artificial Sequence
  Synthetic
SELERVAEEAERIVREAEEKIKKSVTELKELVKRHSERVKRIFKELEELLRRLREK

SEQ ID NO: 17008 - protein, 56 aa, Artificial Sequence
  Synthetic
EDLLREVRKKVEEVVKKIKRLNEEVNRDVKRSAEELKRLIDDIRRILKKVIDDLKT

SEQ ID NO: 17009 - protein, 56 aa, Artificial Sequence
  Synthetic
DEMEEVVKRAEEIVKEARERIEESFRRLREENKEALERLKRIAEEMRRLLKEVLER

SEQ ID NO: 17010 - protein, 56 aa, Artificial Sequence
  Synthetic
EELLRRVEKEVRRVEEEIRRLNKEVNETSDRVEREAEKLVRELEEAVRKVVEDLER

SEQ ID NO: 17011 - protein, 59 aa, Artificial Sequence
  Synthetic
DLEEVIKEARKRLEDSHRRLEKLIREVEKEHEDSHRKLRELVERVKKKHKEVEEKIKRN

SEQ ID NO: 17012 - protein, 56 aa, Artificial Sequence
  Synthetic
VEELLKDLERMVRELNEEIERALEDAKRNVDRLDDEIRKLEERVDRNVKRLEEDIK

SEQ ID NO: 17013 - protein, 59 aa, Artificial Sequence
  Synthetic
SLEDVAREAKKRLEDLKKKITDLIREARRKHKESHDRLRELVEKIKEDLKRVLKKLEDD

SEQ ID NO: 17014 - protein, 56 aa, Artificial Sequence
  Synthetic
VREVKEKLRRTVEALDERIDKLRKELDENVRRLDKEIEDMVRKAKKVVDELREEIR

SEQ ID NO: 17015 - protein, 59 aa, Artificial Sequence
  Synthetic
DLDEVVKEVDRRLEESHERLRRLIKKVDEDHRRSHEDLKRVIDEARRLLEEVLERLRRN

SEQ ID NO: 17016 - protein, 56 aa, Artificial Sequence
  Synthetic
VEEVLKEVKKAVEKLNEDIDRLFEKARENVKRLDEDIKRLLEELRRKVKKAEDEIR

SEQ ID NO: 17017 - protein, 59 aa, Artificial Sequence
  Synthetic
DLERVVEEVKKLLRDSHEEHKKVVKEVKERLDRSHKESKRVSDEVRKKLEEVLKELEDR

SEQ ID NO: 17018 - protein, 56 aa, Artificial Sequence
  Synthetic
VEKVLRDVRRVVTELNKHIEDLKRKVTEDVERLNTEIKELKKRNDEAVRRAREEIK

SEQ ID NO: 17019 - protein, 60 aa, Artificial Sequence
  Synthetic
KEDEDLDRDVKRHIEETEKRVKEVEKRHKDEIRKVREDVKDVERRHKEKIDDVRRKLRDG

SEQ ID NO: 17020 - protein, 55 aa, Artificial Sequence
  Synthetic
EEILRKLRKRTEEIKREAERIHDRTREEIEKIKRDLDEIHKRTREVIKELEERSR

SEQ ID NO: 17021 - protein, 60 aa, Artificial Sequence
  Synthetic
KKEEDIEREIRDHIRRTREKLEKLAKELRDDIRRLREELKRIEDEIREESKRLEDILRKG

SEQ ID NO: 17022 - protein, 55 aa, Artificial Sequence
  Synthetic
EDILRRLREETEELRKEAERLLREYKRLTEELARELRELVKKLEEEVRDLERRSR

SEQ ID NO: 17023 - protein, 60 aa, Artificial Sequence
  Synthetic
SEEERIEEDIRRHIKRTRDRLDELRRRLEEDIKRLRERVEDLKRDLERNIRELRDRLRRG

SEQ ID NO: 17024 - protein, 55 aa, Artificial Sequence
  Synthetic
EEILRRMERLTRELAKDADRLLKKYRKLTEDLKRELEKILKTYRDLTEELKERSR

SEQ ID NO: 17025 - protein, 56 aa, Artificial Sequence
  Synthetic
SELDELRKRIEEAAKELKKRLEDHKRRLEEAEERFERDLERIHRRSREVVRDLKER

SEQ ID NO: 17026 - protein, 62 aa, Artificial Sequence
  Synthetic
DRILREVEDIVRKLKEILKEVRDRLRELSKRLEDRLKEVEDKLDKDVKDVEEELRRILEERK

SEQ ID NO: 17027 - protein, 61 aa, Artificial Sequence
  Synthetic
SRLEKAEEDIKRYIEEHKRRSEETLKELTDKAREITRRLDESLKTVEDTSREIKKDVEDRG

SEQ ID NO: 17028 - protein, 59 aa, Artificial Sequence
  Synthetic
EDLRRVIKRIRELLERLEREDRRIIEEIKKLLDRLKKKVEDIIERIERSLKRLEEELRR

SEQ ID NO: 17029 - protein, 60 aa, Artificial Sequence
  Synthetic
SEEELLRKLEEISRRVTRALEKLLEDHERLSREVAERLEDLLRRHKKLLEELIKLAEERV

SEQ ID NO: 17030 - protein, 56 aa, Artificial Sequence
  Synthetic
EEELDERIRRLKDKNKKNLDDLREHSKEVLERNKENLDELRKHSKKVLDEARKELK

SEQ ID NO: 17031 - protein, 59 aa, Artificial Sequence
  Synthetic
DEKERAKEEVKKLRDDAEKTDRDLEKEVEDTARELKETLERLRREVERLEEELERISRR

SEQ ID NO: 17032 - protein, 55 aa, Artificial Sequence
  Synthetic
KDLTEELKRVLDDHERTLRKIEEDLRRILEEHKKETKKITEELERILEKMRKDEE

SEQ ID NO: 17033 - protein, 56 aa, Artificial Sequence
  Synthetic
STKEELLERAKEIIKRLEELLRRNNRTLREILKDLKKRLEESNREIKRLIDEVTRN

SEQ ID NO: 17034 - protein, 56 aa, Artificial Sequence
  Synthetic
DEDLRRELERLKEEVDRAHKESEEIVKKLEKRIRDAIRRSKKRVDELEKELREAEK

SEQ ID NO: 17035 - protein, 56 aa, Artificial Sequence
  Synthetic
SEKEEVDETLRRLEEEHERVVRDAKRRLEEDHEKLRRVIRDSDRINDEINKKAEED

SEQ ID NO: 17036 - protein, 56 aa, Artificial Sequence
  Synthetic
AEELKRILDETRERIRESMEEIKRKLEESRRESEDIRRKLKEDNDRLKKELDDRAK

SEQ ID NO: 17037 - protein, 59 aa, Artificial Sequence
  Synthetic
SSEEEIRETVKRLKEIVKKHKKDVDEIAEELRRIVEELRRRNEEEIKKIRKILRELEEK

SEQ ID NO: 17038 - protein, 59 aa, Artificial Sequence
  Synthetic
EKLVRELERIVEEIKEELEKSDRELEKIIREIAKRLEEIHEETERAVREVKKRLDEVAK

SEQ ID NO: 17039 - protein, 56 aa, Artificial Sequence
  Synthetic
SEEEKLLERLERTVERLEREARRLLEKSKEKLKRLEDSSRELLDKLRKEVERLRRE

SEQ ID NO: 17040 - protein, 59 aa, Artificial Sequence
  Synthetic
EDFLRELEKLLEEIKRKIEEARERLERSNKELEDVIRDSERRLRKLLKEIEEVIRRKAT

SEQ ID NO: 17041 - protein, 56 aa, Artificial Sequence
  Synthetic
SEIERLLERLKKALEEIKRSSERLIRKLEEVLRDLEREVRKLLEDSRRTLERIRKE

SEQ ID NO: 17042 - protein, 59 aa, Artificial Sequence
  Synthetic
RDAVEELERLLKEIEKTIEESRRRLEELLERIERLIRKVIEELRRSNEELERVIREKSK

SEQ ID NO: 17043 - protein, 59 aa, Artificial Sequence
  Synthetic
KVEKRLRELVERIRESHERVLREVERLVEEHRETLKRILDRIREILKRIEEDIESIRRR

SEQ ID NO: 17044 - protein, 59 aa, Artificial Sequence
  Synthetic
EEVVREELERLERNIKESRDDIRRALKELKDTNEKAKEELERKLEELDRDLKRLREEAR

SEQ ID NO: 17045 - protein, 60 aa, Artificial Sequence
  Synthetic
SEVEDELRKSRKEIEDLAREAERELEEIKRHIERSERKAKEDIDRIEREIEELDKLRKEN

SEQ ID NO: 17046 - protein, 56 aa, Artificial Sequence
  Synthetic
EKALRKSHKELEDLVREVEKKLRELLERYRKRIEEVAKKLDDLLDKLREVVDRAKK

SEQ ID NO: 17047 - protein, 59 aa, Artificial Sequence
  Synthetic
SEVERELKRIKDEIRELAREAREDLERIKEHIKRSKERVEEELRRSEEEIKEIERLARE

SEQ ID NO: 17048 - protein, 56 aa, Artificial Sequence
  Synthetic
KDDLDRLLEELERVVREVKKRLRKLLEDYKELVDRVRKKLEDSHRRLKELAERTKK

SEQ ID NO: 17049 - protein, 60 aa, Artificial Sequence
  Synthetic
DVERELDRIHREHEELLRDIEKKLREILREHEELLKRIKEELDEILERLRKLVEDVKREK

SEQ ID NO: 17050 - protein, 59 aa, Artificial Sequence
  Synthetic
EEEVRDILRRLKEEIDRSRREAEEILRRLKKEIEDTKREVDETKKDLKRTLDEIREEAK

SEQ ID NO: 17051 - protein, 59 aa, Artificial Sequence
  Synthetic
SEVEEEVERIDRNIDRLRKEVEDNIRRSEEEIKRIKEEVEKNLEDLRREIDRIRELVEA

SEQ ID NO: 17052 - protein, 60 aa, Artificial Sequence
  Synthetic
MERMKRKLKELLDKHKKLVDDAKKKHDDSNRKLERLIREATKEHKKALEDLKKLIDDSRR

SEQ ID NO: 17053 - protein, 61 aa, Artificial Sequence
  Synthetic
KDTEEAEERWKAKDKKLEDDVRENLKRLREEITRLEKEVKDNVRRIKELIDKLRRDVEREG

SEQ ID NO: 17054 - protein, 59 aa, Artificial Sequence
  Synthetic
EEAKDSLRKLKKHSDDTVRRVKEEHERVLKEAKELLDKVEKEHRRLLEELERLLREARK

SEQ ID NO: 17055 - protein, 61 aa, Artificial Sequence
  Synthetic
SEEDKERKKWERRDEELRKRVERNEREWERADKELEEEVKREVERIRREIEELRRRVEKDG

SEQ ID NO: 17056 - protein, 59 aa, Artificial Sequence
  Synthetic
DEARKELERLLEHSRKLLEDVRRSHEELVKHSKERADRIRETLKKLLDDLRKLLEDARK

SEQ ID NO: 17057 - protein, 61 aa, Artificial Sequence
  Synthetic
SDIERRKEEWKREDEKLEKRSRKNVEDWERRDEELKRRSEENVRRIKEMIERLEDRVRRDG

SEQ ID NO: 17058 - protein, 59 aa, Artificial Sequence
  Synthetic
EEARKELEKLLRNSKRLVDESERRLRELERHSRELLKRSRRELERLMKELEDLAREIRR

SEQ ID NO: 17059 - protein, 59 aa, Artificial Sequence
  Synthetic
RESEKIKEDMDRSNEKHNKEVEETLKRLEEELKRLEDEVRDAKRELDELLERLERRARD

SEQ ID NO: 17060 - protein, 59 aa, Artificial Sequence
  Synthetic
KELEDLARDVAKKNKESVDRVKKELKRVDEEVKRLLDEVKKDLDKVREDLKRVIDEIRR

SEQ ID NO: 17061 - protein, 61 aa, Artificial Sequence
  Synthetic
SEVEKVITEVEELVREYRKRLEDKRREAKKRVDEYEERLKRMEDEVRKLLEEIERRIRKDG

SEQ ID NO: 17062 - protein, 56 aa, Artificial Sequence
  Synthetic
KDALRRAEEKLKKLIKENKEINDEINERSKELNERSKEVLKKIEEDLRRLIEEVRR

SEQ ID NO: 17063 - protein, 59 aa, Artificial Sequence
  Synthetic
SREDLVREVRERLKKLLKHSAELIKRVKEELEELLRHSEENVREVKKRLDEIKEEAKKR

SEQ ID NO: 17064 - protein, 56 aa, Artificial Sequence
  Synthetic
IEDERRAVEETEERWRRKDDTVRKEVEEEKEKWRREDEKHHRDVERALRKLKRDIE

SEQ ID NO: 17065 - protein, 59 aa, Artificial Sequence
  Synthetic
DEDELVREAKDRLDKLLEHSRKNVEEAEKRLRDLLEHSKKNVEEAERLLEEIEEEARRS

SEQ ID NO: 17066 - protein, 56 aa, Artificial Sequence
  Synthetic
LEEVRKEVKKEIDDWRARDEEHHRDVKRREEEWERKDEEHHRKVEEVIERLKRELK

SEQ ID NO: 17067 - protein, 59 aa, Artificial Sequence
  Synthetic
SVEELIKEVEERLKRLKEHSEDLAREVRERHKKLIEELRRILEEVKKRHKDLTEKLEKD

SEQ ID NO: 17068 - protein, 55 aa, Artificial Sequence
  Synthetic
EEMKKRVEEEEKKWKRDDERLEKRVRENIERLRRLLERLRKRVEDNIKRLDDERR

SEQ ID NO: 17069 - protein, 59 aa, Artificial Sequence
  Synthetic
REEDLIREVERILEELLKHSKRLIDEARDSHRRLLEHSKRLVEEVERLHKELLDRAREN

SEQ ID NO: 17070 - protein, 55 aa, Artificial Sequence
  Synthetic
DRMREEVRKTEERWRDKDRELEKRVRDNERRWEDRDRKLEKRVRDNIKRLRDELE

SEQ ID NO: 17071 - protein, 59 aa, Artificial Sequence
  Synthetic
KAEELVEKVRRDLEALLEHSKTLAEKVRRDHRKLKEELKELLERVKRRLEELKKRLEDS

SEQ ID NO: 17072 - protein, 55 aa, Artificial Sequence
  Synthetic
DELRKKVDEDRRRWEEDDRRLEKRVRENLRRLEKIIKDLEDRVRREVEKIDKDRK

SEQ ID NO: 17073 - protein, 59 aa, Artificial Sequence
  Synthetic
DREKLIEEVKDRLRRLLKHSRELLKEAEDRHRELLKHSERLVRESERRLEELLRRARKS

SEQ ID NO: 17074 - protein, 55 aa, Artificial Sequence
  Synthetic
DEVRKEVKKDEDDWRKADDDLRKRVEDNVRRWEERDRELKERSERNLEKLERERK

SEQ ID NO: 17075 - protein, 59 aa, Artificial Sequence
  Synthetic
SREDLVRRVDKALRDLTRHSEELMRRSDETLKELLKHSRRLAKESEDRLKELLDEARER

SEQ ID NO: 17076 - protein, 55 aa, Artificial Sequence
  Synthetic
ERLEEKVRREEEEWKKKDEELKKRSEKNVDEWRKRDDKLRRDSKRNLDKLREEIR

SEQ ID NO: 17077 - protein, 55 aa, Artificial Sequence
  Synthetic
SLVDEIRERVRRLDEDVRRLIEEIEKRIREIDKRAEDLIRKIEDDSRRTLEEVAK

SEQ ID NO: 17078 - protein, 58 aa, Artificial Sequence
  Synthetic
EELEKVVEENERSLRELVKTLEDVLRKNDKTVKELEKRLREVLDRTRRFMEELIRRAR

SEQ ID NO: 17079 - protein, 55 aa, Artificial Sequence
  Synthetic
SLKDKIREDSERTLKTVERLLREIEKEIRKLDRDIERLIEEIRRRIEKLDKDIER

SEQ ID NO: 17080 - protein, 58 aa, Artificial Sequence
  Synthetic
EELEKVLKDTRDEAERLKEEVRRVLEDNDRTAKELRKTLEEVLKRNEESARELKKRIT

SEQ ID NO: 17081 - protein, 56 aa, Artificial Sequence
  Synthetic
DEERRVEEELREVDKRLKKLLEESKRKLDEVIRRVREVVKKLKKRLDDVNRLVARD

SEQ ID NO: 17082 - protein, 55 aa, Artificial Sequence
  Synthetic
EKILRTVEKLVRDIERELRETNKRVREDVEKIIEDLKRILEENDKRADDWRRADK

SEQ ID NO: 17083 - protein, 56 aa, Artificial Sequence
  Synthetic
DESEEVARELEKVDRDVDKLVKDSRKELEDSNREVEELLRRSTERLKEVNTLVARD

SEQ ID NO: 17084 - protein, 55 aa, Artificial Sequence
  Synthetic
EKLVREVERRVEDIKRKAEKTLDDNRKLIEEWVRRLEKSLEDNRRLAKKWKDEDK

SEQ ID NO: 17085 - protein, 57 aa, Artificial Sequence
  Synthetic
SELDELKKEVDDVAREVRRHNKKLEEEVEREVRRMRRHNEENVKRVEESAKEARKDV

SEQ ID NO: 17086 - protein, 56 aa, Artificial Sequence
  Synthetic
LREVKKLVEEVTRRLERINKELERLIREVRKRMERVNDELHKRNRDVERKLREVVR

SEQ ID NO: 17087 - protein, 57 aa, Artificial Sequence
  Synthetic
SELEALEEDVKRVVKEIKDHNEKLIRELEETIRRIDRHNDENIRRTEEEIKRVLDKK

SEQ ID NO: 17088 - protein, 56 aa, Artificial Sequence
  Synthetic
EEDLRRLLEKLKEDLRKVNEDLERLLREAKRRLERVNEKLHELSRRIREKLEEVDR

SEQ ID NO: 17089 - protein, 57 aa, Artificial Sequence
  Synthetic
SELEKLVEKIKERVERARRHNERLREDVERVLTESDKENKDLIDDARRAVKEVLDRK

SEQ ID NO: 17090 - protein, 56 aa, Artificial Sequence
  Synthetic
EEELDRLIREIIKELEDVNRTLRKLLEEIKRRSKDVNRDLRRLLEEIKEKLRRKSK

SEQ ID NO: 17091 - protein, 57 aa, Artificial Sequence
  Synthetic
SEIDELKKDVERRVREVEETNRRLEKEVRERLERSRKHLKELIEDARREVERVEREV

SEQ ID NO: 17092 - protein, 60 aa, Artificial Sequence
  Synthetic
KKKVLDELKKVIKEVEDRLRKIDEELKKVIDEVRKELEKINRDLERVIREVKKRAEEVRR

SEQ ID NO: 17093 - protein, 57 aa, Artificial Sequence
  Synthetic
REIEELAKTVRKEVDDSRKHLKELREDAKRTLDEVKRETKKLEEDVRREVERVKREV

SEQ ID NO: 17094 - protein, 60 aa, Artificial Sequence
  Synthetic
KEKVLRELKKVIDEVRKLLEDINRELEEAIRDVKRKNEDTLRELRKVIKEVEKRLKDVTR

SEQ ID NO: 17095 - protein, 58 aa, Artificial Sequence
  Synthetic
KEVEDVVRELKKSLEENEKRVRDIERELREVVKKIAKRVEETREEVERMLEEIRRRSG

SEQ ID NO: 17096 - protein, 56 aa, Artificial Sequence
  Synthetic
IKKVVDEARKVLKEVHENTERIVDEARKLLKRMEEKNRKTEEDIRRVADEVREKAR

SEQ ID NO: 17097 - protein, 58 aa, Artificial Sequence
  Synthetic
SKVDKVREEVTRSLEDNKRKVEEIEREARESLERNRKKVEDSIREARKVVEEIERKKG

SEQ ID NO: 17098 - protein, 56 aa, Artificial Sequence
  Synthetic
IDTVTRRIREVMKKVHDNTRRIAEELRRLMKRVHDNTERSHEELKRLLEEVKRKAD

SEQ ID NO: 17099 - protein, 58 aa, Artificial Sequence
  Synthetic
REVEEVVKELKKSLDDNRDEVRKIIEEVTRLNKRNEEDVKRVTDEAEEVVKRIVEKKG

SEQ ID NO: 17100 - protein, 56 aa, Artificial Sequence
  Synthetic
IRKVVEEARRLLERVHRNTKRVADEIRKLDKRSSELLDKILKDLRKLLEDVEREAR

SEQ ID NO: 17101 - protein, 63 aa, Artificial Sequence
  Synthetic
DEKDEVRRRVDRELEDVHRETKKSSDDDKRLLEDVHRKLKESEKEVRRIADEVRKKLEDVRRR

SEQ ID NO: 17102 - protein, 55 aa, Artificial Sequence
  Synthetic
REVLEKIKRSLDENKERVEKSKKDSDDSLRENKDRVDKTDEEAKEMIKDLKRKTD

SEQ ID NO: 17103 - protein, 63 aa, Artificial Sequence
  Synthetic
DEKEKVTREVRRILEEVDKRLEESRERVERIAEEVHRRTEESHRRDEEVVERVKEELKEARRD

SEQ ID NO: 17104 - protein, 55 aa, Artificial Sequence
  Synthetic
REVLEELKRELRRLEEDVRRTDRKLEESLKDNERKVRRSKEESDRLLRELEERTR

SEQ ID NO: 17105 - protein, 63 aa, Artificial Sequence
  Synthetic
KEVEDVRRRVEKILEEVHKKTREVTERVRRILEEVHRKTEESHRRDEEVMRRVRDELEKARRR

SEQ ID NO: 17106 - protein, 55 aa, Artificial Sequence
  Synthetic
REVIEKVKESLRENERRARKVEKEIRDSLERNRERVEDSKRTSKKLIEDLREAVR

SEQ ID NO: 17107 - protein, 63 aa, Artificial Sequence
  Synthetic
DEEKELVRELRDILKKVHKETKESSDTDREVLKRVHEDTERSHRDDERVVEEVKKELDKIRDR

SEQ ID NO: 17108 - protein, 55 aa, Artificial Sequence
  Synthetic
REVEDEVRRSLEDNRRRVEESKRRSDESLRRNKRKVERSKEESDRLLKELEDEVR

SEQ ID NO: 17109 - protein, 57 aa, Artificial Sequence
  Synthetic
REVEEALKRNEAVVEESREAVERALRENETMVRESEKEAKRVKDENRKSIEELKRSN

SEQ ID NO: 17110 - protein, 59 aa, Artificial Sequence
  Synthetic
EEVLERVVRKLKELDDKSREDLEKVKKELRDVDTRSEELLREVEKRLREVDDRLRREEE

SEQ ID NO: 17111 - protein, 57 aa, Artificial Sequence
  Synthetic
SEVEEVEKENKKMVEESERELEKLERENDKLLKESEDEARKVEEELKRVVEELDRSN

SEQ ID NO: 17112 - protein, 59 aa, Artificial Sequence
  Synthetic
EEVLREVVKDLRRVDKESKERLKRMADKLRDVDRELKEKLKRALEDLRRIVTELRERAR

SEQ ID NO: 17113 - protein, 60 aa, Artificial Sequence
  Synthetic
DEVETVTRELEDTNRDIEKKVEEVERELRKTDREIREKVKRVEEELTRSDRELAEIVKKK

SEQ ID NO: 17114 - protein, 59 aa, Artificial Sequence
  Synthetic
GEDVKRIVEKARKINEDVRREIEKITEEVRRINEEVDDRIRRIAEEARRINEKVKRRLT

SEQ ID NO: 17115 - protein, 60 aa, Artificial Sequence
  Synthetic
KEVDDVAEELRRTNKEIKDRVKDVLRELEELLTDIEKTVRDVERELRESDERLEREVRRK

SEQ ID NO: 17116 - protein, 59 aa, Artificial Sequence
  Synthetic
GEEVRRIVEKARKINTEVKKKIEEIEKTVRKILKEVRKIIKDIRDEARRINEEVRKKLE

SEQ ID NO: 17117 - protein, 56 aa, Artificial Sequence
  Synthetic
KEVEDIVRELEEEVEKIRDHSRRVSEELDKSVKDNKRRVDEVKKTLEKSVRDIRRK

SEQ ID NO: 17118 - protein, 58 aa, Artificial Sequence
  Synthetic
EVLKDVARRAREMLEEVRRKDRENTERARRLLEEVHRRTEEVERRAREVLKKADEDVK

SEQ ID NO: 17119 - protein, 60 aa, Artificial Sequence
  Synthetic
SELDELRKRVRDLDERLKESDDTLRKLVKELIERVKKSDTELERLVERVIEEIERVLRDR

SEQ ID NO: 17120 - protein, 60 aa, Artificial Sequence
  Synthetic
VKDRLRELEEELRKRMKESDERNRDLRRRLEEMIKDSKRTNDELKKRVEKVAREAEEKLR

SEQ ID NO: 17121 - protein, 60 aa, Artificial Sequence
  Synthetic
DELERLEEEVEEVRRRLEKSDDDLRKLVDEVERRLRESDKRLHDLSEEVIRRIEDVLRKN

SEQ ID NO: 17122 - protein, 60 aa, Artificial Sequence
  Synthetic
VKDELRKLKEKIKKVADESRRRNEELRRKVDKVIKDSRETNKRNTEEVRKVAKDVDDTVK

SEQ ID NO: 17123 - protein, 60 aa, Artificial Sequence
  Synthetic
SEEERIAKEAEDLVRRVKENNARTIKEAREVARKVEAETKKIHDDARKLVEDVKRKVERR

SEQ ID NO: 17124 - protein, 55 aa, Artificial Sequence
  Synthetic
RELKERLERVIKEIEETIRRSARELDEVNRRNEKMVKENEDELRKVIEEIERRIR

SEQ ID NO: 17125 - protein, 58 aa, Artificial Sequence
  Synthetic
DEEEEIKKELRRVAEDVKRETKRIHEEIRRVLKEVKERLKRVHDELRRVAREVKEKLK

SEQ ID NO: 17126 - protein, 55 aa, Artificial Sequence
  Synthetic
RELTEEAKKLIKENEEEIERNEREARKVIEELERVVRTNKEDVKRVEKEIEDATR

SEQ ID NO: 17127 - protein, 58 aa, Artificial Sequence
  Synthetic
KEVEEIAKEAEDVLRRLDETVKEIADEAREVLRRLNESSKRIEEEARKAIKELRDRAR

SEQ ID NO: 17128 - protein, 59 aa, Artificial Sequence
  Synthetic
KDELRKILKEVRDVLEEVKRRNEDILRRLRKIAEEVKRRNDKIREELERVLKEAEDRLR

SEQ ID NO: 17129 - protein, 55 aa, Artificial Sequence
  Synthetic
SRLEKIKDDVKRLDDDSRRTLEEVHRRNKETARRVERLLEEAHRLNKKTVDEARS

SEQ ID NO: 17130 - protein, 58 aa, Artificial Sequence
  Synthetic
DEIRKIKTDVKEMVKKNREDVKRNNEDVKRVEDKLRKELKKNDDDVRRVLEELERRLR

SEQ ID NO: 17131 - protein, 60 aa, Artificial Sequence
  Synthetic
SEIEEVTRRLEELVKTVREVLREAHERTRRLVEKVRKLIEDVIRTNRKIKERVRELLERV

SEQ ID NO: 17132 - protein, 58 aa, Artificial Sequence
  Synthetic
DEIRKLRRRVEEVVRELEEELEKDRREVEKVIEELEREVDRSNEETRRVVKRLREEVE

SEQ ID NO: 17133 - protein, 60 aa, Artificial Sequence
  Synthetic
REKEEVRRKLREAERRVEEIDRRLEKLIRDVKRRVEEADRESEETSDRVRKEVERVDRRG

SEQ ID NO: 17134 - protein, 55 aa, Artificial Sequence
  Synthetic
EEVKERLKKVLEDNRRSIDELRRRIEEVLKENKRTVEEDKKRLEKVLEDVERRAR

SEQ ID NO: 17135 - protein, 56 aa, Artificial Sequence
  Synthetic
SDTEEVEKLTEEIVREVKRLDEEVKELIKEIRKESRRTLEEVRRLIEEVRDRVEKI

SEQ ID NO: 17136 - protein, 59 aa, Artificial Sequence
  Synthetic
SKDLERLRRELEEVLKENADSIRKLETELRDVLRRTREEAEKLKEELKDVLRRVEEKAK

SEQ ID NO: 17137 - protein, 60 aa, Artificial Sequence
  Synthetic
DEERKIREEAKRADDEIRRLLEENKRALDESNKRAEELVKRLADEVREALKRIEDLLRER

SEQ ID NO: 17138 - protein, 56 aa, Artificial Sequence
  Synthetic
VKKVVERLRRLIKEVKKRLEKIHEDSRRMVEESEKLLKEIVRKLRELIKEVEDKVK

SEQ ID NO: 17139 - protein, 60 aa, Artificial Sequence
  Synthetic
DEKEDLKRTAEESDREAKKLLDENRKRLEESNKKAEDLVRRNEETLRKVDTDIKDLLRKR

SEQ ID NO: 17140 - protein, 56 aa, Artificial Sequence
  Synthetic
VKKVLDELRRLVEESKELLKRIHDESEKMVEDSERLLEEVHRRSREVVERVREKIR

SEQ ID NO: 17141 - protein, 60 aa, Artificial Sequence
  Synthetic
SEKDRLSKRAAESDEELERLVRRNAEELDRSNKEIADLLKESKDTLKRAEDEIRRLLAER

SEQ ID NO: 17142 - protein, 56 aa, Artificial Sequence
  Synthetic
VEKVLKELEDVVKKSKELLERIHKESKEMVERSKRNNEKSLEDVRRLIERVLEKLK

SEQ ID NO: 17143 - protein, 60 aa, Artificial Sequence
  Synthetic
DEKRRLKEEAKKSDDELRKLVKDSADRLEDATRRIEELLRENAKRLEEAEKRIREELDKR

SEQ ID NO: 17144 - protein, 56 aa, Artificial Sequence
  Synthetic
VEEVLRRLKDLVERSKENNKRSLEEVERLIKEVEERLKRIHDESEKVVRTVEERLK

SEQ ID NO: 17145 - protein, 60 aa, Artificial Sequence
  Synthetic
REAEEIKKRLERVREEVEKELERIHRETDKIAKDVKRELDEIDKESKKVAEEIKKVAEEI

SEQ ID NO: 17146 - protein, 57 aa, Artificial Sequence
  Synthetic
KVDELKRRVEEVKRDLERKVRENNETIKKVKEDLRREVERNHKTIEDIKRELDERVR

SEQ ID NO: 17147 - protein, 60 aa, Artificial Sequence
  Synthetic
SEAEELLDRIRRVAEEVKRRLEEIHRTTRDIVRRIEELLKEIHERTREIVERIKRVLEKI

SEQ ID NO: 17148 - protein, 58 aa, Artificial Sequence
  Synthetic
DKVKRLEEEIRKIKRELEKIVRDNNEDIKRAKERLRKINKRNHDEIKKVKDELDETVR

SEQ ID NO: 17149 - protein, 60 aa, Artificial Sequence
  Synthetic
SEAEDLRRRIEEVARRVAEKLKKINRDTERIVRDVKKKLEEIHKRTEEVAEEVKEVLRRI

SEQ ID NO: 17150 - protein, 58 aa, Artificial Sequence
  Synthetic
DEVEELRKTIEDIRRRLEEEVRRNHDEIRKAEEELRELNRRNHERIKEIKEELDREVT

SEQ ID NO: 17151 - protein, 60 aa, Artificial Sequence
  Synthetic
SEVEKIDKRAKEVEKELEESNRRNRERIKEADERLRDLLRRNKEEIDRARKRLDEIVRRD

SEQ ID NO: 17152 - protein, 59 aa, Artificial Sequence
  Synthetic
KKRLKEVERRMEEIVKTVKKRSEDSHRESDEIVKRVLERLRKVHEETKEIVKRVEDRLR

SEQ ID NO: 17153 - protein, 60 aa, Artificial Sequence
  Synthetic
EEAERIDKKLEDEVREVERELEDVHRKVKEILEDVKRKHKKVHDELKKVIDEVKRKLEER

SEQ ID NO: 17154 - protein, 55 aa, Artificial Sequence
  Synthetic
KELEEKVRRIVRKLERRVEKNKDDTRRAVEEAEKLNEDNKRTSEKVEEDLRRTTT

SEQ ID NO: 17155 - protein, 60 aa, Artificial Sequence
  Synthetic
SEAEEIVRELRKAVEDVAREHKRIHEEVRKAAEDVKRKLKEILDRLERVVEEVARALEER

SEQ ID NO: 17156 - protein, 55 aa, Artificial Sequence
  Synthetic
DELREEAKEVVRDVRRLNEENRKATEDILRELKEIVERLERRAREVVKELKERAR

SEQ ID NO: 17157 - protein, 60 aa, Artificial Sequence
  Synthetic
DEREEIRRRLREDVKRVKRRLEEIHDEVRRLLEEVDRRLRKVHKELKEEVTEVEKRLRER

SEQ ID NO: 17158 - protein, 55 aa, Artificial Sequence
  Synthetic
RELKKEIDDVRKELEETVERNKRETERALRKAKEDLDRNREEVKRVVDELEKRTR

SEQ ID NO: 17159 - protein, 60 aa, Artificial Sequence
  Synthetic
SEKDEIRDELEKILRRVEELNRRIRKKLEEIRKEVERLLREIHEKLEEVVKEVEEKLRER

SEQ ID NO: 17160 - protein, 55 aa, Artificial Sequence
  Synthetic
EELKRRVEEVLKRARESLRELEEDVRRVLEEARKELERNRERVERVLRRLEETVR

SEQ ID NO: 17161 - protein, 59 aa, Artificial Sequence
  Synthetic
DEVEDLERRLKEVVDRSRRLDEELKRRDKKSVEDVRRKLEEVRKKLEDVARKLADLLRQ

SEQ ID NO: 17162 - protein, 55 aa, Artificial Sequence
  Synthetic
EKLERDVARAREENDRTLKEISKHSEKVLREVADMARKLRKEVKRIEDEIRERAR

SEQ ID NO: 17163 - protein, 60 aa, Artificial Sequence
  Synthetic
KLVEEVKREIEELVRRLEEVLDRVRRENERLAEELKKVVKDVEDNNERIARTVTELLKKV

SEQ ID NO: 17164 - protein, 59 aa, Artificial Sequence
  Synthetic
KEKVDELKRDVDRAEEKVRELIERIKRRSEEVKKRAEELLKKLEDDSRRVKKKLDDDAR

SEQ ID NO: 17165 - protein, 60 aa, Artificial Sequence
  Synthetic
SEVDEVRKEIKRLADEAREVVKEVRKNNEKIADDSRKLNERSIRESKKVTDTVRELLKRV

SEQ ID NO: 17166 - protein, 59 aa, Artificial Sequence
  Synthetic
EERVKELKERVDEVSKELRDLLKKLRDDSERVVEENEKLLRELKERSDRATKELDDASK

SEQ ID NO: 17167 - protein, 60 aa, Artificial Sequence
  Synthetic
KKAEKVDKEIEDLAREVREVLKEVEKDSDRLVKEVEDVLRRVKENNEDIRRRVSELDRRV

SEQ ID NO: 17168 - protein, 59 aa, Artificial Sequence
  Synthetic
EESVERLRRKVKEIEDELRELLERLRKKSEDAKRKLRELLERIKRDSERAKRELEERDK

SEQ ID NO: 17169 - protein, 59 aa, Artificial Sequence
  Synthetic
DTAREVKRKVKEIADEVRELIRRVHEETKKTSETVKKLIKEVHDTTEKIVREVRKLADE

SEQ ID NO: 17170 - protein, 59 aa, Artificial Sequence
  Synthetic
KKLVEELKREVDRISEELKRLLERNEREVRESKKTLERDLERNHEEIERAKRELDERVR

SEQ ID NO: 17171 - protein, 60 aa, Artificial Sequence
  Synthetic
REVDEVRKRVEKVAEEVRRLIEKVHRETERTSREVEKRIRDVHRRSDEVAREVDDLSRRV

SEQ ID NO: 17172 - protein, 59 aa, Artificial Sequence
  Synthetic
KKMVRTLAERVKEISEELKRRLKRNKDEVEESSRRLRELLKRNHDEIRRIKEKLKEETR

SEQ ID NO: 17173 - protein, 60 aa, Artificial Sequence
  Synthetic
EEVDRVKRKLEEVEKRVTEISKRTEELVEEVRKEVERISKRTEEDDRRVAKEVRERLKSG

SEQ ID NO: 17174 - protein, 56 aa, Artificial Sequence
  Synthetic
AKEIKEKVDEVIERLRRSNRKLHERIREVEKKLRELNERLHRHSREVIKELEERAR

SEQ ID NO: 17175 - protein, 60 aa, Artificial Sequence
  Synthetic
KEVEDILRDLERLSEESLRRNEEIHRELEELLRRVDEKNREIHKTLEEMVRRALTELRKR

SEQ ID NO: 17176 - protein, 59 aa, Artificial Sequence
  Synthetic
EKVVREVDRRVEESRKRLEKLLRENEKRVRDARRRARKLSEENERTVREVEKRAREEVK

SEQ ID NO: 17177 - protein, 60 aa, Artificial Sequence
  Synthetic
DEVEEIKRKLDKVADESRKLDEDIRDKLRRVADEIRRLHEESRKELEDVVREIERLLRER

SEQ ID NO: 17178 - protein, 59 aa, Artificial Sequence
  Synthetic
EKVIKEVRDTVEKILRENEKSLEEVRKTVKRIEEESRELLETSRDEVRRVLEKAEETEK

SEQ ID NO: 17179 - protein, 60 aa, Artificial Sequence
  Synthetic
SVADEIRKDLKRVADEVEERLRRLLEHNKKVRDEVKERVDESKKELKEVEEEVTEKLERI

SEQ ID NO: 17180 - protein, 59 aa, Artificial Sequence
  Synthetic
EKVVREIEERIRRVIRRLDEVDKTNEKISRDAARELEESDEELRRRVKEVKDRLDEKTK

SEQ ID NO: 17181 - protein, 60 aa, Artificial Sequence
  Synthetic
DEAEKIKKELDDVAREVERRLKELLDDNRRVAEEVEKRLRDSKRELEEVTRRVRKELERI

SEQ ID NO: 17182 - protein, 59 aa, Artificial Sequence
  Synthetic
KKLVDKIRDDIRRIARRLDEMNKKNKKLSDELEERLKKSNEEHRRRVEKVKEELEKKVE

SEQ ID NO: 17183 - protein, 60 aa, Artificial Sequence
  Synthetic
SEAEEIEKELREVAKEVRELMREMLKNNKEVAEEVKRRLERSRERLEEVEETVRDLLEKI

SEQ ID NO: 17184 - protein, 59 aa, Artificial Sequence
  Synthetic
DKVVKKIEDDIREVEKEARKLNRENRELSKKLAEELDRSNDRHRREVERVERELEKAER

SEQ ID NO: 17185 - protein, 60 aa, Artificial Sequence
  Synthetic
SLQERVRDKVRKVKKDLEDLNRRHREEIERVVRELDKSNEDHEREVRRVEKELEELIRRN

SEQ ID NO: 17186 - protein, 59 aa, Artificial Sequence
  Synthetic
KKFVEDVDRALKRIADEVKRRSEESKKELDDIKKEVEERLRESKEKLKRIVDEARERLR

SEQ ID NO: 17187 - protein, 57 aa, Artificial Sequence
  Synthetic
SELEEVIKRAEDELRDDERENKRVLEKSDRDIKRWEEEVKRVLKKARDELDKLRKEG

SEQ ID NO: 17188 - protein, 59 aa, Artificial Sequence
  Synthetic
KDVVEKLREELEKVLKESRDESKRLKEELDKVNDDARKRLEDLMRKLERVLEEVRRRRK

SEQ ID NO: 17189 - protein, 56 aa, Artificial Sequence
  Synthetic
SELERVIEEIRRALEEDHERNRDVLREAKEELERDKRRNDKVLTDIRKLVKDLERK

SEQ ID NO: 17190 - protein, 59 aa, Artificial Sequence
  Synthetic
EETVRRLTEELRKVLDEVTKRSKELSDRLREVLRRSKELSKELEKELRKVIKEADDRVK

SEQ ID NO: 17191 - protein, 56 aa, Artificial Sequence
  Synthetic
SEIERVLKEARDELRKDEEKNRDLLRRAKKVIEEDHKRNRDVLRRVKEELDRLREA

SEQ ID NO: 17192 - protein, 59 aa, Artificial Sequence
  Synthetic
KDALDRLRRELEEVLRRSKEESDRLAEELKRVLREIEERSRRLAKELKEVLDTAKRDKD

SEQ ID NO: 17193 - protein, 57 aa, Artificial Sequence
  Synthetic
SELERVIRENERTIREDMKKNEDVLREWEKLTRDLEDTIRRVLKKNRESLKRLKDKG

SEQ ID NO: 17194 - protein, 56 aa, Artificial Sequence
  Synthetic
RRELVKRLRDVDERSDDTSRKLKEELERVIRRTEELIRRVMEDAKRVDDEARKKTD

SEQ ID NO: 17195 - protein, 56 aa, Artificial Sequence
  Synthetic
SKVEEVLRELERRVKEDEDENRKVVRENERTVKEDEDTNRDALRRNEESIDKLRRD

SEQ ID NO: 17196 - protein, 56 aa, Artificial Sequence
  Synthetic
VDTLKRELDEALKRSEEESRRLKEEVTRIDERSKRESDRLVEEAKRLDKEAKDRSD

SEQ ID NO: 17197 - protein, 60 aa, Artificial Sequence
  Synthetic
SELEEVLKKAAEVIKEIEKRLRKVLEDSRRLTKEDEKRNKEVLKKLKEKIDEIEKRARDK

SEQ ID NO: 17198 - protein, 59 aa, Artificial Sequence
  Synthetic
DEVLRRLDRELKEVLDRVEREVERLKEENDRMNKKSKDDSEKLERDLERVAERLERELK

SEQ ID NO: 17199 - protein, 61 aa, Artificial Sequence
  Synthetic
SEAEKVLKEAREAAKRIEDEARKVLRESRELAKKAEEDDRRALKRAKEAAEKIKRDADRKG

SEQ ID NO: 17200 - protein, 59 aa, Artificial Sequence
  Synthetic
DKAIKEAADRLKKVLEDAEKKAREAAEENKRANEEWKKKSKRAAEEAKKVLDEAKKELD

SEQ ID NO: 17201 - protein, 59 aa, Artificial Sequence
  Synthetic
SDKERIKERVKKVHKESAKHIEDVRRRNEEINKRIKEEIDDVERRNREINEDIRRLVRE

SEQ ID NO: 17202 - protein, 55 aa, Artificial Sequence
  Synthetic
ERVIEDLERLIEENKRTLTEVIKRHRELLEDWKRRLDEVLKDHERSAREIDEEAR

SEQ ID NO: 17203 - protein, 60 aa, Artificial Sequence
  Synthetic
DEKEEVRRTVEERLKRVEDRVRELEKENEDINRELKERLKKVRRENEEINERLKKLLDEN

SEQ ID NO: 17204 - protein, 55 aa, Artificial Sequence
  Synthetic
EEVIRRVEEEIKRIEKRLRDVIKKHEDSVRKIRTDMERVVRDHERLAKKWEDDAR

SEQ ID NO: 17205 - protein, 59 aa, Artificial Sequence
  Synthetic
DEAKEIEDRVRTEIRDIERKVREARERSKRSDDELKKHSEEVARELEEILRELEEALRR

SEQ ID NO: 17206 - protein, 55 aa, Artificial Sequence
  Synthetic
KSVIDEVRKAVEDIARKLKKVLEDNKREIDKDRKRNEEVLRTAREKAEKIKEDAR

SEQ ID NO: 17207 - protein, 59 aa, Artificial Sequence
  Synthetic
DEKEKIKEDVRRVIRRIEEIVKRVDRESERSDRELEKHSRDVERRLREINDRLRRLLEE

SEQ ID NO: 17208 - protein, 55 aa, Artificial Sequence
  Synthetic
ERVIEEVKRLIDRIREELERVLEKNARLAKEDEERNERVLTENRKLIEDWEREAK

SEQ ID NO: 17209 - protein, 61 aa, Artificial Sequence
  Synthetic
SKLEEVVRRVDKDARDIRRRNEEVKRRNEKSAREIEKKVKKVLEEFRRLVEEIRKRLEEEG

SEQ ID NO: 17210 - protein, 59 aa, Artificial Sequence
  Synthetic
ERVLKELEERVRKVLKDNRDTSKELEERVRRIDEELDKTLRKAKEELRKIIRELEERLR

SEQ ID NO: 17211 - protein, 61 aa, Artificial Sequence
  Synthetic
SELEKVLERVKREAERIEKKNKKVLEENKKSAEEIHRDNERVLREVKDMADKIEDELRKRG

SEQ ID NO: 17212 - protein, 59 aa, Artificial Sequence
  Synthetic
RKVLRDVERRVKKILDDNKRTSDEMKKRLDRLDETNKRTSEKLEEDVRRIIEDLERRVK

SEQ ID NO: 17213 - protein, 60 aa, Artificial Sequence
  Synthetic
SKLEEVLKKLERLAREIERRLRDVIRRNKESADRIRKRNEEVLRKVEDVAREIEDKVRRG

SEQ ID NO: 17214 - protein, 59 aa, Artificial Sequence
  Synthetic
EEALRTLDKRVEDIIKRLKEEVDRVVRDLEELDKENEKSSREVEERLKEIIRELEETLK

SEQ ID NO: 17215 - protein, 61 aa, Artificial Sequence
  Synthetic
SKLEEVLKTLRRLIEEIKKRLKKVKDDNKKSLEDIHRKNKRVLEELEKRLRDIDKKLKDKG

SEQ ID NO: 17216 - protein, 57 aa, Artificial Sequence
  Synthetic
VLKEVEERVERIIRELRRRVEELKRRVEELDRRNEKTSDDLEEELKRIDKELKDRTD

SEQ ID NO: 17217 - protein, 60 aa, Artificial Sequence
  Synthetic
SKVEDVVRRVAEVAERIRRRNEEVAEENERSLKEIHDENKEVVERARKMAKRIEDEVRRK

SEQ ID NO: 17218 - protein, 59 aa, Artificial Sequence
  Synthetic
EEVLKTVADEVREILERNEKTSEELAERVRRLDEENRRTSREVEKRVEEVIEDLKRRLK

SEQ ID NO: 17219 - protein, 61 aa, Artificial Sequence
  Synthetic
SEVDKLEEDLRRIIKEIRRLVEEVKRKSEEIDRELKRLLEEAERTLEEIDRKLEDELRKKG

SEQ ID NO: 17220 - protein, 58 aa, Artificial Sequence
  Synthetic
DKVREVKKDVEKKLKELEEELRDITRRNRESLKRLEERLKEVAKKNRKTVDELRKELD

SEQ ID NO: 17221 - protein, 61 aa, Artificial Sequence
  Synthetic
DEVDDLKRRLEKIITEDEKLVKEVKDRSEKLDREIAKLLEDARRALEKLDKELEEILRKKG

SEQ ID NO: 17222 - protein, 58 aa, Artificial Sequence
  Synthetic
DKVREVVKRVRDEADKSRRKLEEITRRNRDSLERIKRKLERVLEENDRTLRELEERAR

SEQ ID NO: 17223 - protein, 58 aa, Artificial Sequence
  Synthetic
SELEKVVEDSRRKLDAWDDESRRVAEESRRRLEEWRKRLEEVAKRVEERLRDLKRKAG

SEQ ID NO: 17224 - protein, 59 aa, Artificial Sequence
  Synthetic
EELVKKMARELDELNKDLDRLNKESKRELERLNTELAELIKEVERELRELLRKLEEDLR

SEQ ID NO: 17225 - protein, 58 aa, Artificial Sequence
  Synthetic
DSLEDVVRRVKKKLDDNRKDVERVAKESEELLKRWRDRVKKVVRDVERRAEELRRRRG

SEQ ID NO: 17226 - protein, 59 aa, Artificial Sequence
  Synthetic
EELIKTFERTLEELHKTNKKLNEEVKKRLEELNTRLAKLIEDVRKELEKVLKELEDRAR

SEQ ID NO: 17227 - protein, 58 aa, Artificial Sequence
  Synthetic
DELDEVVREVKDRLRENKEEVKRVMDESRRLLERWNEESERVAKKVEEAVRKLTKDKG

SEQ ID NO: 17228 - protein, 59 aa, Artificial Sequence
  Synthetic
EDDIRRITKRLRDLHRENEKLNRDVKKELRELNERLAKLNRDSTRELEELLRKLEEDAR

SEQ ID NO: 17229 - protein, 58 aa, Artificial Sequence
  Synthetic
SELDKVVEESKRLLEEWDRRSKDVAKKVKEMLDRSRKASKEVVKEARDELERLKRETG

SEQ ID NO: 17230 - protein, 59 aa, Artificial Sequence
  Synthetic
EKDIREIKERLKRLNETLAELNERSKKRLKRLLDEDKKLNDDSSKELKELLKELEDRTR

SEQ ID NO: 17231 - protein, 58 aa, Artificial Sequence
  Synthetic
RELEDVARRARKKLEDNKRRVEEVAEEVERRLDESRKESDKVVREVEEVLKRLKEERG

SEQ ID NO: 17232 - protein, 59 aa, Artificial Sequence
  Synthetic
EELVKRMTEELERVHRENEKLNRDVRRELEDILRKDEELNKRSKKRLKDLLDELRRRLT

SEQ ID NO: 17233 - protein, 58 aa, Artificial Sequence
  Synthetic
SELEEVVKKVRTDLDRIDEKSKRVAKEVDRVLKESEDRSKKVAREVEEVLRKLKEEAG

SEQ ID NO: 17234 - protein, 59 aa, Artificial Sequence
  Synthetic
EDLVRRAVETLERLIRELEKLNDESKRRLEEILREDKRLNKESTEELRRLLEELRKTLT

SEQ ID NO: 17235 - protein, 58 aa, Artificial Sequence
  Synthetic
SEVERVAEELKRVLKELEDLDRESEKKLKRLNEELARLIEEVRRRLEEVLRTLEELAK

SEQ ID NO: 17236 - protein, 58 aa, Artificial Sequence
  Synthetic
REVEEVIRRIDEAIKRIEKHSREVIERSRERVEDWRRKVERVIEEVERRARKLREDTR

SEQ ID NO: 17237 - protein, 58 aa, Artificial Sequence
  Synthetic
SEVEKVAEEAKRVLDELEKLDRDSAKELKDLNDELRKRDKESEDALRKITRDLDELDK

SEQ ID NO: 17238 - protein, 58 aa, Artificial Sequence
  Synthetic
KDVEKVIRDLKRELERLAKHSEEVIRTSEELLKRWEDHSRKVIEEVKERARDIKRRTK

SEQ ID NO: 17239 - protein, 57 aa, Artificial Sequence
  Synthetic
SELEKVVKEVEEALERNNRENRRVIRRSRELLKRWREEVEEVVRRLRERAKKIADDV

SEQ ID NO: 17240 - protein, 59 aa, Artificial Sequence
  Synthetic
EEEVRKLEEDLRRILEEIDRESDRLVKRIEDLNRRVAELLKRVEEELEDLARKVEEEAK

SEQ ID NO: 17241 - protein, 60 aa, Artificial Sequence
  Synthetic
SIEEIVEEIERELEKLKRKLDELIKRSEELSRRLAEKTRRSNEEIKREIDKVADDIRKTL

SEQ ID NO: 17242 - protein, 59 aa, Artificial Sequence
  Synthetic
EDTIRRVLEEAREEIKKLERDVDKVRKEVEDAHRKNSELNKTVHDEVRKIIDEIRKEVK

SEQ ID NO: 17243 - protein, 60 aa, Artificial Sequence
  Synthetic
SIEEILREIEELIKDLLRKAEELLKESEKRSKELKDEMKRSNEEIRKLIEDLRRRAKDRV

SEQ ID NO: 17244 - protein, 59 aa, Artificial Sequence
  Synthetic
EDVIRDLLRRVREDIDRLRKELEKVVRELRRIHEEVRRDLKRVHEEVRKRIEDLEEELK

SEQ ID NO: 17245 - protein, 60 aa, Artificial Sequence
  Synthetic
KEVEDVVRRVRKLIEDNERRNKEVHEEVEKRARENVERNRELLEKIRRTVEEIRRELEEL

SEQ ID NO: 17246 - protein, 56 aa, Artificial Sequence
  Synthetic
KDLLDEVRRLLERVKRRTEESNRRVKKIVDDVKRTSEEILREVEELLRRLIDDARK

SEQ ID NO: 17247 - protein, 61 aa, Artificial Sequence
  Synthetic
DEVEKVFREVKKRIDENREKNRRVHEKVEREARRNSEENRRVHEEVRKTVEDIRRELDEKR

SEQ ID NO: 17248 - protein, 56 aa, Artificial Sequence
  Synthetic
EELLRRIEKLAREVRDETRRSNEKVKEIIRRVEKESEDSNREVKRLLDELTRDARR

SEQ ID NO: 17249 - protein, 60 aa, Artificial Sequence
  Synthetic
SEVEDVVRKAREILKRNEDENRRVLEKVREDLKRLTDENDKVVEDVREMVRRIKEMLDRN

SEQ ID NO: 17250 - protein, 56 aa, Artificial Sequence
  Synthetic
EELLREVDERIKDVKRKTDEILREVRERIKRNEERTERLRREIEELARRLLEDAER

SEQ ID NO: 17251 - protein, 59 aa, Artificial Sequence
  Synthetic
DEEDLLEKIERILEEVKRRLEDVIRRVRKSNEDIERELKKAVDRSRELLRKVEEDLRRN

SEQ ID NO: 17252 - protein, 55 aa, Artificial Sequence
  Synthetic
RDVFERLERIARRLTEEIEKALRDSDKLNEELKRKVEEVLRRSEESIRTVLEELR

SEQ ID NO: 17253 - protein, 60 aa, Artificial Sequence
  Synthetic
DEIEKVRKDVDEIIRRLEEELEEVAKRLEDLNREIERILREVKKESDDTIRTIERLRKEG

SEQ ID NO: 17254 - protein, 56 aa, Artificial Sequence
  Synthetic
ESIVKEVRDKLRRLEKRLDDLAKRNEESLRELKRTLEEIIKRSRKENKRIEDEVRK

SEQ ID NO: 17255 - protein, 60 aa, Artificial Sequence
  Synthetic
SEVEEVEKELRELIREDKERLDRLRKELKESIDTNKEKLDRVKEDLERLIEEIREEARRR

SEQ ID NO: 17256 - protein, 59 aa, Artificial Sequence
  Synthetic
RERLTKLVEKIREVLERSKEHSERVAKKIRDELDKLHKETERVDRKLKTEARRLKEELR

SEQ ID NO: 17257 - protein, 60 aa, Artificial Sequence
  Synthetic
DEVERVEEELKESIDRNDEELRRVRKENRESIEKDRRDLKRVEDDLRRLIKKIDEEVRRR

SEQ ID NO: 17258 - protein, 59 aa, Artificial Sequence
  Synthetic
EEALREVVRKLRKLLKELHEETKRVMEKLRKLDRESEEHTKEVDERIKKTIEDLERELK

SEQ ID NO: 17259 - protein, 60 aa, Artificial Sequence
  Synthetic
SEVDEVRKELRKVIKEDEDTMRKLEEENRKSIEEIRKELEKVEEELERVIRRIEDEIRKR

SEQ ID NO: 17260 - protein, 59 aa, Artificial Sequence
  Synthetic
REVLETLVRKIREELKRSKEHSKRVADDLRRMDEEIRREVKRVVDKVRELLKRLEDELK

SEQ ID NO: 17261 - protein, 60 aa, Artificial Sequence
  Synthetic
DEVEDVLRRLKELAEEDKTKLKEVEKENKESIKEDRKRLEDVRRELEKLIEEIRREVTER

SEQ ID NO: 17262 - protein, 59 aa, Artificial Sequence
  Synthetic
EKVLRDVSRRIKEEVEKSKKHSEEVKKELEDADRESKRHTEEVEKKIRELIERLKRETK

SEQ ID NO: 17263 - protein, 61 aa, Artificial Sequence
  Synthetic
DEIDRLREELKRLIDKDKTDLDRVRKENEESIRDDERKLREVEKELRDLIEEIRRKAKERN

SEQ ID NO: 17264 - protein, 59 aa, Artificial Sequence
  Synthetic
RRVLEEVARKIRELIRRSEKHSEDVMEKVRRNDERSKRHTEDVTRKIRTEIEKIDRELE

SEQ ID NO: 17265 - protein, 60 aa, Artificial Sequence
  Synthetic
KEKEDVKKRLDEEAEKNKRTSEEAKRRNRESIRRNKETSKRVKEENRRSFEELDDLLRRG

SEQ ID NO: 17266 - protein, 55 aa, Artificial Sequence
  Synthetic
KRVEEELDKLMEEIRRHNRESNEELKRLVEEIRKHNRESNEELKKLLEEIERKTE

SEQ ID NO: 17267 - protein, 60 aa, Artificial Sequence
  Synthetic
DEDKDVEKKLRDIIKRNKETSRDVARRLEEIIKRNKKTSDEVATEVRKLIKEIEDVLRRG

SEQ ID NO: 17268 - protein, 55 aa, Artificial Sequence
  Synthetic
EKVKEELRRLIEEIKEHNERVLRKLRKLVEEIERTNEDIRRELKELVEDIRRKAK

SEQ ID NO: 17269 - protein, 60 aa, Artificial Sequence
  Synthetic
SEKEEVRKRLRDKVEDNKRTSKEVADKLRKIIKENKDTSKKVMEDLRRIIEEADELLRRG

SEQ ID NO: 17270 - protein, 55 aa, Artificial Sequence
  Synthetic
DDVRRELDELVKRIAEENKRVEDELRRLVKEIEDHNEEVKRELKELVKRIEEKTR

SEQ ID NO: 17271 - protein, 60 aa, Artificial Sequence
  Synthetic
SEKEEVEREVEERLRDNKRTSDKVVEENRDSVRRNKKTSEDVKRENEESVRRIDEVLKRG

SEQ ID NO: 17272 - protein, 55 aa, Artificial Sequence
  Synthetic
EDVKRKAKRMVEEIRERNRKSNEELKKLAEEIRKHNKDSNKKLKELVDEIRRKAK

SEQ ID NO: 17273 - protein, 60 aa, Artificial Sequence
  Synthetic
DEERRVREKLKKIIKDNEDTSRKVREDVKKELDDNRRTSEKVARDNERSIEEIKKALERG

SEQ ID NO: 17274 - protein, 55 aa, Artificial Sequence
  Synthetic
EEVRRELDKLVKEIKERNDEVIEEARERVKRIREKNERSNRKLKKEAKKIEEEAR

SEQ ID NO: 17275 - protein, 60 aa, Artificial Sequence
  Synthetic
DEDREVERDLKKIIKDNKRTSEEVEKKLRDIIRKNEKTSKEVEKELRDIIRRADELLRRG

SEQ ID NO: 17276 - protein, 55 aa, Artificial Sequence
  Synthetic
EEVKKDLDRLAEEIKKRNEEVRKDLDDLVRKIEKRNEEVKEELDRLAREIEEKAR

SEQ ID NO: 17277 - protein, 60 aa, Artificial Sequence
  Synthetic
SEEDEVRRRLRRIIEENRRTSEEVRERLRKIVEDLERTSRDVRRKLREIVERIKEVLTRG

SEQ ID NO: 17278 - protein, 55 aa, Artificial Sequence
  Synthetic
REVEEELRRLIEEIERRNKEVREELDRLIEKLEDDNRKVHKELRELAKEIKDRAD

SEQ ID NO: 17279 - protein, 60 aa, Artificial Sequence
  Synthetic
RELEEVVKRIRDILREIHERSEKSAEENRRLIEKAEEDSKRSAKRIREIIREIREEVKRI

SEQ ID NO: 17280 - protein, 62 aa, Artificial Sequence
  Synthetic
RDVREKLERVAREVEKSNKDNRDHSKRVEEESRELLKKLRKHSEDVAREVKKLLDELREETR

SEQ ID NO: 17281 - protein, 60 aa, Artificial Sequence
  Synthetic
SELEKVVEDIRRLLRKIHEDSKRSVRKNEELVEELKRLSEKSEREIEELLRRIKELLKRI

SEQ ID NO: 17282 - protein, 62 aa, Artificial Sequence
  Synthetic
ERVKRKLDDVEREVRKSNEDNRKHSDEVRRKSEDMLEKLRRESERVADRVRKVLKELEDERR

SEQ ID NO: 17283 - protein, 60 aa, Artificial Sequence
  Synthetic
SELEKLAKEIEEILREAKERSKESAERIRKLVRDLRELSRESEERIRKIETDVKKKIDDI

SEQ ID NO: 17284 - protein, 62 aa, Artificial Sequence
  Synthetic
REVRRKVEDVERRVTKVLKELEDRSREVEEEVERVLRDLKRHSDEVRREVEEVLRRLTERTK

SEQ ID NO: 17285 - protein, 59 aa, Artificial Sequence
  Synthetic
SEREKIAEDIRKLVDESRRNLEDVVRRARELAERVRRNLKRVMETLERLAEEIRRIIES

SEQ ID NO: 17286 - protein, 55 aa, Artificial Sequence
  Synthetic
KDLERELKELLDKHKKDLDDVREEIRRMLETHKEELDRVKKRVEDVLREAAERTR

SEQ ID NO: 17287 - protein, 59 aa, Artificial Sequence
  Synthetic
DERERIREEVRKLARESKENLKRTEEDLKRRLEEVKRNLERVDEEVERLVRTVAEIVRK

SEQ ID NO: 17288 - protein, 55 aa, Artificial Sequence
  Synthetic
EELKKEAKKLLKEHRDKVKEIKEDLKRAHEEHRKRLEEVVEKLKRVLRDLAEKVR

SEQ ID NO: 17289 - protein, 59 aa, Artificial Sequence
  Synthetic
SEREEIVKTLRELVKRVKENLKRVTEEARKLADESRRNLERVAEEIRKIAEEVKRIVER

SEQ ID NO: 17290 - protein, 55 aa, Artificial Sequence
  Synthetic
KDLEKELEDVHREHKRRLDEVVREMEDLLRKHEDDLRKVKREAEKMLKELTETTK

SEQ ID NO: 17291 - protein, 59 aa, Artificial Sequence
  Synthetic
SEREEIAERAERLSREVKKKLEDIRREIEELAKRVLDNLRRVLRDVERLIEEVKDIIRR

SEQ ID NO: 17292 - protein, 55 aa, Artificial Sequence
  Synthetic
KKLKDDLDRADEELERRARKVDEDLKELHERHRRLLEDVRRELERVIKELKEETE

SEQ ID NO: 17293 - protein, 59 aa, Artificial Sequence
  Synthetic
SDRERIAKRARELSERVKEKLEEILKEVRKISKDMKKRLEDILREAEELSRRIKEIVES

SEQ ID NO: 17294 - protein, 55 aa, Artificial Sequence
  Synthetic
DELRKELEEVDDELRRKIEEIKKELETMDKELRDRAKEIEKRLEDSNREVEERRR

SEQ ID NO: 17295 - protein, 59 aa, Artificial Sequence
  Synthetic
SEREEIAKTVRKLSREMKETLKKITEEARRLSEEVKRALKKIVDDLRELMKDVKRIVES

SEQ ID NO: 17296 - protein, 55 aa, Artificial Sequence
  Synthetic
KDLKKELEDVDRELADTIRRVEEELKKVNEELRKRVEDVREEAERALRELEERVR

SEQ ID NO: 17297 - protein, 59 aa, Artificial Sequence
  Synthetic
DERERIAEELKKLTEEIRRRVEDVMREAERLAEEIKRKLEDVLEEVRRLSDRIREIIES

SEQ ID NO: 17298 - protein, 55 aa, Artificial Sequence
  Synthetic
DDLRREAEKVNRKVREDLKRIEDRMRELLKEVEDLLRKIEEEARKSNKELEDRTR

SEQ ID NO: 17299 - protein, 61 aa, Artificial Sequence
  Synthetic
SEAEKAREDVERAAKESKDKLDEIRKEVEKAARESREEAKRNEKDIKDAAKKLRELARDKK

SEQ ID NO: 17300 - protein, 55 aa, Artificial Sequence
  Synthetic
RDVLEELRKIAEDDKRRVDKVARELRELAKRDKEEAKKVHDENKKSAKEAEDELR

SEQ ID NO: 17301 - protein, 60 aa, Artificial Sequence
  Synthetic
SSDETLRRELEKAVEESRRLLEENRKTIEDMVRESKRLLDRNREEIKKLVEELKKLLRDN

SEQ ID NO: 17302 - protein, 55 aa, Artificial Sequence
  Synthetic
RDVLREIRELLKRDKERLKEVHKRNRESAKRDKDRVKDVHRKNRDSARRVKERLR

SEQ ID NO: 17303 - protein, 60 aa, Artificial Sequence
  Synthetic
SSDETARKEIEDMVRESKKLLEEIREELDRVVKRLRRELEENEKDIKRLVKRLRDLLREN

SEQ ID NO: 17304 - protein, 55 aa, Artificial Sequence
  Synthetic
RDVLREIRELAKRDKDTVKKVMEEIRDRLRKLDERIKEVHERNRRSLKDVEDKVR

SEQ ID NO: 17305 - protein, 60 aa, Artificial Sequence
  Synthetic
DEDREAKRRLDEAVKESRDRLEEIRKEVEKMVRENEELNRRNEEEIRKAVEELRELLRRQ

SEQ ID NO: 17306 - protein, 55 aa, Artificial Sequence
  Synthetic
RDVLREIEEELTKDRKRVKEVLEELRRIAKRLKERDEESHERNRRSLDKLKKEVK

SEQ ID NO: 17307 - protein, 60 aa, Artificial Sequence
  Synthetic
SSEDEARKEVDKMAKESEELLRRNEETIRRLVRENEEKNERNRREIERVVRELDRLLKER

SEQ ID NO: 17308 - protein, 55 aa, Artificial Sequence
  Synthetic
RDVLRELREIAERDKKKVEDVHRENRDSARRLKEEDDDSHRRNRKSMKEVKEDVE

SEQ ID NO: 17309 - protein, 60 aa, Artificial Sequence
  Synthetic
REIEEVAKRLRKLVKELKERSKESKDRSRKLMTELKKLSKDSLRELRRLLDELRKILKDR

SEQ ID NO: 17310 - protein, 62 aa, Artificial Sequence
  Synthetic
RDVKKKLDEIRREVKKVIEEDKRLNDESEKDSRRLIREDEDENRRIKEEIDRAVEELRRRRK

SEQ ID NO: 17311 - protein, 60 aa, Artificial Sequence
  Synthetic
SDIERVLEELRRLVERLKRETERFAKELRDLARRVKEMSKRSEEELRELATRLKDTLRRR

SEQ ID NO: 17312 - protein, 62 aa, Artificial Sequence
  Synthetic
RDVEEKLRRIKRELREVIKEDEKRNREIEREVDKVIRELEKLNKRIEDEVRKLEEELERRLK

SEQ ID NO: 17313 - protein, 60 aa, Artificial Sequence
  Synthetic
SDIERMRDRLRKLVEEAREKSDRSREELEKLVRELRRKTEKFLKELRDLARRLKETLKRR

SEQ ID NO: 17314 - protein, 62 aa, Artificial Sequence
  Synthetic
RDVKEKLDRIRKEVEEVARDLKRKNDEIEEEIKKVIRDDERRNEEIEKEVRKMAEELRRTLK

SEQ ID NO: 17315 - protein, 60 aa, Artificial Sequence
  Synthetic
SDIERVRKELRELLERVARRSEKSMRDDKKSMDDLKKEIREVEEELRRLATEVKKTLKDR

SEQ ID NO: 17316 - protein, 62 aa, Artificial Sequence
  Synthetic
RDVKKKLEEIEREIREAIKDLRRKNREIERTNREVIKELREELKRIDTEVKKLVKELRETSK

SEQ ID NO: 17317 - protein, 60 aa, Artificial Sequence
  Synthetic
SELEELERDLERELEEDKRRNEEVMERNERRLRKLKEDVDRVVKELEDLLRKLEKILREE

SEQ ID NO: 17318 - protein, 59 aa, Artificial Sequence
  Synthetic
ESELERLDRRLKKLIKESRETVDEIEERSERAIRDLERKLKELEERLRKKIKELRDETR

SEQ ID NO: 17319 - protein, 59 aa, Artificial Sequence
  Synthetic
DETKKVEDDLRRVDTESKKHLDDVHKESKRVADELRKKLEDVHRRSEEMVRRLRRLLEE

SEQ ID NO: 17320 - protein, 55 aa, Artificial Sequence
  Synthetic
EEVKKRIDDALRENERRAEENRREIERVLKELEDRVDENRRRIEEVRKELRDRAT

SEQ ID NO: 17321 - protein, 59 aa, Artificial Sequence
  Synthetic
DETREVDERLKEADRRSKKHLDDVHKTSKKVLDELRRKIEELERRVRKVVKELEELLRE

SEQ ID NO: 17322 - protein, 55 aa, Artificial Sequence
  Synthetic
EDVRRKVDKIIKENRKMLEDNKRTIEEVLRELKERADEIKERVKKVLKKLEEDRR

SEQ ID NO: 17323 - protein, 60 aa, Artificial Sequence
  Synthetic
DEEEKVERDVERVDKESKEHLDRVHEETRDINRRSEEHLRRVHRDSEDVARRLRDAVRRR

SEQ ID NO: 17324 - protein, 55 aa, Artificial Sequence
  Synthetic
EKVKRRVEEAIKRNRDEARRDEEEVKKAIKRNREEADRNRREIEKVVEELRRRAT

SEQ ID NO: 17325 - protein, 60 aa, Artificial Sequence
  Synthetic
SEKEEVKRRVDEITKRARKKLEDVHRRSEKIDRDSREHLERVHKRTKEILDELRDELRKR

SEQ ID NO: 17326 - protein, 55 aa, Artificial Sequence
  Synthetic
EDLRRRLEKVFRELKETLDRNREEIDRMVKRNRKTLRDNKEEIDRAVREARERLK

SEQ ID NO: 17327 - protein, 60 aa, Artificial Sequence
  Synthetic
REDEEVLKDLKRIVDELRKKLKELHDRSEEIDKRSKKHLDDARRRVEEIMRRIEKRLREE

SEQ ID NO: 17328 - protein, 55 aa, Artificial Sequence
  Synthetic
DKVRKDLKDVAKEMRDRLEENERRIREAAKRNRTELERIERELKEFKDRLDETAR

SEQ ID NO: 17329 - protein, 60 aa, Artificial Sequence
  Synthetic
SEVEKVMEEAKRIVTELEEKIRELERKVKKIDEDSRRHLKEVHDRTAEIAKTLRDILRKE

SEQ ID NO: 17330 - protein, 55 aa, Artificial Sequence
  Synthetic
DKIRREIEEAVERLETEARRLRREVEEAVRRNREMLKRNEKEIKDVAKELRDRLR

SEQ ID NO: 17331 - protein, 60 aa, Artificial Sequence
  Synthetic
REDDRIRDEIRKLVEDNRRLLREILERLKTLADRLREINKKSNDDNERSADELREVLKKV

SEQ ID NO: 17332 - protein, 55 aa, Artificial Sequence
  Synthetic
EEVRREVEKAIRDSKEKLDELEERVRRMIEESEKLVEDNHRRIEEVEREMEEALR

SEQ ID NO: 17333 - protein, 58 aa, Artificial Sequence
  Synthetic
KDEEEIKKAIEELVKRNEDIVEEIKRRSDKLADDLRDINRRSNEDNDRSLKTLEELLR

SEQ ID NO: 17334 - protein, 55 aa, Artificial Sequence
  Synthetic
KEVRDRVRRAIEKSKEDLDKSEDDSRKVIEESKRLVEENHRRIRKAVRKAEEATR

SEQ ID NO: 17335 - protein, 59 aa, Artificial Sequence
  Synthetic
SEEEEARKKLKEAADRNRKVNEDAKKKAEDAARKNKKANEELAKKLKDAAEELKRVSRD

SEQ ID NO: 17336 - protein, 55 aa, Artificial Sequence
  Synthetic
EEIKERAKEVLERHKRSAEKIKEEAKRVLDEHRKRARDWEEEARRVLKEAEEEAR

SEQ ID NO: 17337 - protein, 59 aa, Artificial Sequence
  Synthetic
REEEEVRKEVKKLKKENEDVNDKVRRDLEELLERNRKVNKELEDKIRDAKRRADEMLRV

SEQ ID NO: 17338 - protein, 55 aa, Artificial Sequence
  Synthetic
EEIEEELRKVLKEHKELVERWKREAEEVLEESKRLIDKWKEDLERVLEDFRRKAE

SEQ ID NO: 17339 - protein, 57 aa, Artificial Sequence
  Synthetic
SEAEEIEKRLKEVLDRHDKSAREIKDRLRKVIEEHRKLVEEWEKEARDVVKELKDEN

SEQ ID NO: 17340 - protein, 56 aa, Artificial Sequence
  Synthetic
TRRLRERLRKMEEDNRKINKEIRDEVKELEKENREINKRVEEELKRVRDELKRTAD

SEQ ID NO: 17341 - protein, 57 aa, Artificial Sequence
  Synthetic
DEVEDIKRELEEVVKEHEKSVEDDERKNEDVVRRHDELVKKWEEDLRRVIEKLKRDN

SEQ ID NO: 17342 - protein, 56 aa, Artificial Sequence
  Synthetic
ERDLRRRVKDLKRRNKEMNERSKKHSDEVKEENKRINEEVEKKLRDVKEKLDRDIK

SEQ ID NO: 17343 - protein, 59 aa, Artificial Sequence
  Synthetic
SELEKLIKEVEDLAKEVADKLRKSNKELRELVRKIAKALEETNREIEKVVRRVKRLLES

SEQ ID NO: 17344 - protein, 57 aa, Artificial Sequence
  Synthetic
KLKKIKEDLKRIADEIRKIVEDSKRDLERVADEARKIVEKSKEDLKRAKEEAEKETK

SEQ ID NO: 17345 - protein, 59 aa, Artificial Sequence
  Synthetic
DELDELTKRARELVERNRRHIERSNRELKRLVKEVLDRNRENHKTVEELVKTVLKLAKD

SEQ ID NO: 17346 - protein, 59 aa, Artificial Sequence
  Synthetic
RSDVERVRKELKDSTDDIKRLVDKSREDLKRAKEKDEKSVRDNRERLRRVLRRLEEEVR

SEQ ID NO: 17347 - protein, 59 aa, Artificial Sequence
  Synthetic
SELEKLTKEVRDDVRRVMERLKRSNDDIRRLAEEVIRRNDESRKKLEKLVEEVKDLFRR

SEQ ID NO: 17348 - protein, 57 aa, Artificial Sequence
  Synthetic
KVREIERELDEVRKRLEDLVRKSKEDLDRVREELERLVEKSKRDLDKARRDLDEARR

SEQ ID NO: 17349 - protein, 59 aa, Artificial Sequence
  Synthetic
DELEELEKKVREDVRRVKEKMERSHRETEKLARDVKKRLEDTNREIKKLVKEVEDILRR

SEQ ID NO: 17350 - protein, 59 aa, Artificial Sequence
  Synthetic
KSKVEKVRRDLDEARKRLEELDRRNRKRLEEVRKEIREIVEKSKEDLKRAKDRARETVR

SEQ ID NO: 17351 - protein, 59 aa, Artificial Sequence
  Synthetic
SEAEALIEEVKTLVRRNKEHAKRSHEKTEKLVRDVADALRKTNDEARKLVEEVRRILES

SEQ ID NO: 17352 - protein, 59 aa, Artificial Sequence
  Synthetic
KSKLERLKRELTRSAEELRELDKRNEDELRRAAKRIRDIVRKSEEDLKKVRDDAREKTR

SEQ ID NO: 17353 - protein, 60 aa, Artificial Sequence
  Synthetic
KDVEEVRKELDEIARRVTEEIKRVHDETARIVDRLRERLEKVTRDNRRSVRELEKELERN

SEQ ID NO: 17354 - protein, 59 aa, Artificial Sequence
  Synthetic
EKKLREAKKRLDELAERLKRLIDRNREEIKRVAREADERIRENEKEVEEVEERLDRKIK

SEQ ID NO: 17355 - protein, 60 aa, Artificial Sequence
  Synthetic
KDAEKVVEDLERKADAVMRKLEDVSRRHREIAKRIKDRLEKVHRDNEKSVEDLKRILKRN

SEQ ID NO: 17356 - protein, 59 aa, Artificial Sequence
  Synthetic
EEIVRRAEKKVEDFERRLRKLIEDNKREVDKVEKELRDTIRRNEERIREAVEELKRTSD

SEQ ID NO: 17357 - protein, 60 aa, Artificial Sequence
  Synthetic
EDVRRVVEELRKIAEDAKEKARRVHERDRERVRKVEEDAKKVHEENEESVTRLERLLDRR

SEQ ID NO: 17358 - protein, 59 aa, Artificial Sequence
  Synthetic
EDDVRRIREEVEKVRKDLKDIVKRNKEANDEVEKRLRDIVRRNRERIEEMRRRLEEKKR

SEQ ID NO: 17359 - protein, 60 aa, Artificial Sequence
  Synthetic
EDVKRVVKELEDIAEEVRRRLEKVNRENRESMKRLEEELRKVHEENRESIERLKRTLKDR

SEQ ID NO: 17360 - protein, 59 aa, Artificial Sequence
  Synthetic
EEIVKEAKERVDKVKDDLRRLIEENERDIRRMDRKLEDEIRRNDEELRRVVREAEETVR

SEQ ID NO: 17361 - protein, 60 aa, Artificial Sequence
  Synthetic
SDVERVRRELREIAETVKERLREVNERNRKSVRDVEEIVKKVHEEDKDLARKVEEILERN

SEQ ID NO: 17362 - protein, 59 aa, Artificial Sequence
  Synthetic
KERVDDIKREVDKAREDLRRLIEENKRDIKEVVERLEKLIKDNRDDNDRLRRRLEEKSR

SEQ ID NO: 17363 - protein, 60 aa, Artificial Sequence
  Synthetic
SELEKVEKELKRIVDEVKKELKRVHEDDERLVRELEESLKKVTEDDRRLARELEDTLRKR

SEQ ID NO: 17364 - protein, 59 aa, Artificial Sequence
  Synthetic
EEDARRAEERVRRVVKELKELIERNKKRNKEAVERLRRLIEENKRENREVEKRARDTAR

SEQ ID NO: 17365 - protein, 60 aa, Artificial Sequence
  Synthetic
KDAEEVLERLKKIAEEVAKELRDVDEENRRLLKRWAEILEEVTREDERLARELEERLERR

SEQ ID NO: 17366 - protein, 59 aa, Artificial Sequence
  Synthetic
EEKLRRAKEEVDRAEKELRELIKRNKDNLERAVRELEKLIEENERRNREVEKRLEDRER

SEQ ID NO: 17367 - protein, 60 aa, Artificial Sequence
  Synthetic
KDVEDVVRRLEEIAKRVKERLKEVDKRNKDKAREWLKEVKEVHERNEKLAEEVRRTLKDN

SEQ ID NO: 17368 - protein, 59 aa, Artificial Sequence
  Synthetic
EEIVREAEKRVREMERELRELIERNKRNVEEMDRRLEELIKENEERNKRVEEDLRRKTK

SEQ ID NO: 17369 - protein, 60 aa, Artificial Sequence
  Synthetic
DEVEEAKRRLTELVDRLRKTLEKVSREDRELEERVRKITKDSHDTTEEILKRLKRELEKG

SEQ ID NO: 17370 - protein, 59 aa, Artificial Sequence
  Synthetic
EKDLRELEERVRRAVKKLRDDLRRNKKESEEVKKKLEDENKKNRDRVAEAEEELRRRTT

SEQ ID NO: 17371 - protein, 59 aa, Artificial Sequence
  Synthetic
DEVREMLRTLDEIARRLKKRTKESIDTDRRLVKKLREETDKSIEDDKKLVKEVEELLDG

SEQ ID NO: 17372 - protein, 59 aa, Artificial Sequence
  Synthetic
ERKLRELEKRIRKAEEELRRDNERSKKETEDVERDLERKNEESERRTREAEKRLKERSD

SEQ ID NO: 17373 - protein, 59 aa, Artificial Sequence
  Synthetic
SEVEEVLKRLRDIARELEKLIEEVIRRDRKLVEELKRRSERSIETDRRLVKRLKEMLDG

SEQ ID NO: 17374 - protein, 59 aa, Artificial Sequence
  Synthetic
EEKVRRAEEEIREVERRLRKLLRDSKEETKEVVKELRRLNEESKKETEKVVREAEKRTK

SEQ ID NO: 17375 - protein, 59 aa, Artificial Sequence
  Synthetic
KDAEEVVRRLTKLVEDLKRKIEEVIREDKELVDRVRDTSRKSDETLEKLVREVKKLLRE

SEQ ID NO: 17376 - protein, 59 aa, Artificial Sequence
  Synthetic
EEKLKRLEDRVREAEKELRELLERSEDTTRRAERELEELNRRLEDKIRRVVEELKEESR

SEQ ID NO: 17377 - protein, 59 aa, Artificial Sequence
  Synthetic
SEVEDVLRRLERLVRELEKETKRSLEENEKLARRLKKKLEDVVRDNKRLVDEVKELLKE

SEQ ID NO: 17378 - protein, 59 aa, Artificial Sequence
  Synthetic
EEKLRRLEKLVRDAARRLKELNDRLRKRSKEVKEELERILRELKERSDRAKEDLRRAAK

SEQ ID NO: 17379 - protein, 60 aa, Artificial Sequence
  Synthetic
SELEKVEKDLEKLIRDDEEENKRVLEELERLVREDKEKNKRVHDETRKLEDTLRRILEKS

SEQ ID NO: 17380 - protein, 62 aa, Artificial Sequence
  Synthetic
EEAKEKLRRLKERIREAEEKSRKSLRDIEETLKKVKRESEETDRRNRDTLRRAKKRLKDETR

SEQ ID NO: 17381 - protein, 60 aa, Artificial Sequence
  Synthetic
DEVEEVKKTIRDLLRRNKEISRETLERLKKLVDENRERNKKVHDETKKLTEEIKKILEEI

SEQ ID NO: 17382 - protein, 62 aa, Artificial Sequence
  Synthetic
EEAEKELRKLEKEVKDAKEESERSDRRLEKEIRDVERDSERSDRENRDEIRRVAEELDERSR

SEQ ID NO: 17383 - protein, 60 aa, Artificial Sequence
  Synthetic
SEAEKVLRDLEELVRENEEKSERSLRELEKLVRDNEEKNKEVVKRIKDLAERIRRILEEI

SEQ ID NO: 17384 - protein, 62 aa, Artificial Sequence
  Synthetic
EDAKRKLEEIRKTLEEVKRRSEDSNRELRRRLEEVKRRSEKSLRDLEELVRRIKKELDDRSR

SEQ ID NO: 17385 - protein, 60 aa, Artificial Sequence
  Synthetic
SEADKLREDLERRVREIEKRSRDSDKRLEELLEEIRRRSKRTLDELERRLREVEEELERE

SEQ ID NO: 17386 - protein, 59 aa, Artificial Sequence
  Synthetic
KKKVDRVRDEVRKVKRKLEEEHKKLERKVREARKELEKSHRDLNREVKKAKERLDRKRD

SEQ ID NO: 17387 - protein, 60 aa, Artificial Sequence
  Synthetic
DEVEKLRKELEDLAEKIKRESEKTLRELKKLADEIRKLSEDTLRRLKELLDRVEELLRET

SEQ ID NO: 17388 - protein, 59 aa, Artificial Sequence
  Synthetic
ERKVRELEKTVEKIKRELEKSHEDLNREVEKIKRDLERSHKELNELVKRAEERLRRETK

SEQ ID NO: 17389 - protein, 60 aa, Artificial Sequence
  Synthetic
SRVEELKRRLEELIERIDRESKRTLKELKDLAREIKELSERTLRELERLAKEVKEELDRI

SEQ ID NO: 17390 - protein, 59 aa, Artificial Sequence
  Synthetic
EEKVKELEERVRRVDEELERSNERLRREVKKIKEELKESHERLNKRVEEIRRELRERSR

SEQ ID NO: 17391 - protein, 60 aa, Artificial Sequence
  Synthetic
DEAERLEEEIRRLAEEIKRLSKESLERVEKLLEEVRRESKRTLEDLERLVRDVEDKLRKI

SEQ ID NO: 17392 - protein, 59 aa, Artificial Sequence
  Synthetic
EEKVRRLKKRIDEIKEELKKSNEDLHRRIEEAKRELEELHERLNRDVERVKEKLRRDAK

SEQ ID NO: 17393 - protein, 60 aa, Artificial Sequence
  Synthetic
RELEELLKTLEELLKKIEEESRRSLEELKRLVDDIRRKSEESLERLERLAERVKEVLDRE

SEQ ID NO: 17394 - protein, 59 aa, Artificial Sequence
  Synthetic
KEKIDRLEKRVRDAKKRLEDLHRELNKRVEDVKRDLEESNKRLHDTVREIKKELRERTR

SEQ ID NO: 17395 - protein, 60 aa, Artificial Sequence
  Synthetic
DEVRELEERIDRILKKIEDESRRTLEEIKKIAREVEKRSEDTLRELDDLVRRVEELLERI

SEQ ID NO: 17396 - protein, 59 aa, Artificial Sequence
  Synthetic
EKDVRRLEKKIREAEKRLRESNERLEKTIRDIKKRLEKLNKELKDRVDEVVKRLRDKTE

SEQ ID NO: 17397 - protein, 60 aa, Artificial Sequence
  Synthetic
SELEELLERLKRRADEIRKESEKTLEELDRDARRIEKESRETLEELKKRLDDVRRALEET

SEQ ID NO: 17398 - protein, 59 aa, Artificial Sequence
  Synthetic
KKKIDDLRRKVEEIEKDLKRSNDELRKRVKEIKDRLKELHDKLNEDVKRARKELEERRK

SEQ ID NO: 17399 - protein, 60 aa, Artificial Sequence
  Synthetic
SEAEELLERLDRRLRRVEETSKRTLDELKRLLEDIERKSRKSLKELEDLVRKVKDMLRRE

SEQ ID NO: 17400 - protein, 59 aa, Artificial Sequence
  Synthetic
EKKIRDLERRVEEAARRLEKSNRDLAEEVERAERRLDRSNRELRRRVEKVLKELEDTER

SEQ ID NO: 17401 - protein, 60 aa, Artificial Sequence
  Synthetic
SELEELEKRLEDLAREIKRRSRESLKELEELVKRIEETSKRTLDELKRLLDEVVKELRRI

SEQ ID NO: 17402 - protein, 59 aa, Artificial Sequence
  Synthetic
EEDIRRLEERVEKIREDLERLNRELHETVKRVKKRLEDSNRRLKEEVRKAKRRLDEELK

SEQ ID NO: 17403 - protein, 60 aa, Artificial Sequence
  Synthetic
SEAEELTERIRKILKEIRELSEKSLRELRELVKTITELSKESVERLKRRVEEVKEELRRI

SEQ ID NO: 17404 - protein, 59 aa, Artificial Sequence
  Synthetic
ESKVRELEERIRRAEEELKKRNEDLHREVRKVLKELRDSNKELEKEVKRVKKELRDESR

SEQ ID NO: 17405 - protein, 60 aa, Artificial Sequence
  Synthetic
SELEKLAEDLERLAEEIKRESDRSLEELRELAERIKRESRKTLEDVKKLLKEVKEVLDRE

SEQ ID NO: 17406 - protein, 59 aa, Artificial Sequence
  Synthetic
DKKIEDLRRRVEEIIKRLEKSNRDLRKEVEDIKRELEKLNKELHDTIREAKERLDRTTK

SEQ ID NO: 17407 - protein, 60 aa, Artificial Sequence
  Synthetic
REVEELLKELEKVVRENEKKIEDLHKRNEDVVRKIEKDHRDSEKELKEVADRVRELLERK

SEQ ID NO: 17408 - protein, 59 aa, Artificial Sequence
  Synthetic
EDDVRRLKKRAEESLKKIEDDLRRDEDRLRRVIEKSKRLVDKLREELERVLREIEKRIR

SEQ ID NO: 17409 - protein, 60 aa, Artificial Sequence
  Synthetic
SEAEKLKEDLDRVVEKVKEDLKRLHDENRRVAEKNERVIEELHRRNREVTKELEKRLEEK

SEQ ID NO: 17410 - protein, 59 aa, Artificial Sequence
  Synthetic
EEKVKRLRDAVRKVLKEIEEELERDERAVAKTLRKIEELLKRDKKELDKVRKRLEERLR

SEQ ID NO: 17411 - protein, 60 aa, Artificial Sequence
  Synthetic
SEAEKIEEELRRAAETAKKRHEDSERELEEAAKTAEERAKRIHDRNERAAEEAKKRAEDD

SEQ ID NO: 17412 - protein, 59 aa, Artificial Sequence
  Synthetic
EEKATRIKREADEARKESKKLAEKLKKRADEARRKLEEEAKRDKERADRAAKEIEDRAR

SEQ ID NO: 17413 - protein, 60 aa, Artificial Sequence
  Synthetic
SEVEKLKEDLKRVVERVKRDHERSLKRLEDVAREVEKRIRDLHERSKDVMRRLKDLIDKK

SEQ ID NO: 17414 - protein, 59 aa, Artificial Sequence
  Synthetic
EDELRKLAEDIKRAEDESRKLVERLKKKAEEVRRKIKKLLEENEEELKRILDRLREAAK

SEQ ID NO: 17415 - protein, 60 aa, Artificial Sequence
  Synthetic
SEVEELLERLKKVADDIRREIEKLHKRTKEVADEVRKRHEDSRRELEKVADEVRDRIEKD

SEQ ID NO: 17416 - protein, 59 aa, Artificial Sequence
  Synthetic
SKALKRLSDEIKKIEDEIRKLLEDNRREVEEAEKESRKLVEELERRAKEVEEEIKRARD

SEQ ID NO: 17417 - protein, 60 aa, Artificial Sequence
  Synthetic
SEVEKILEDLKRVVDEVRKRHKESLDRNKKVADEVRELHERSDKELEDVVREVKDKLEKN

SEQ ID NO: 17418 - protein, 59 aa, Artificial Sequence
  Synthetic
SKDVKRIEDELRKANEESRRLVEELRKHSEDVNRESRKLVEDLERKLRKAEKDIEDDAR

SEQ ID NO: 17419 - protein, 60 aa, Artificial Sequence
  Synthetic
SEVEDLLRRLKEVVEEVERLIKKLHKETKEVVDEVRRLHEKSLRELKKAADDARDALRRN

SEQ ID NO: 17420 - protein, 59 aa, Artificial Sequence
  Synthetic
EEKVRRLAEEVKRALDRIKELIKRNRDELKRANEESKRLVERLREEAERILRDLRRKLD

SEQ ID NO: 17421 - protein, 60 aa, Artificial Sequence
  Synthetic
SEVEKIKKDLEKVADEVRRLHKESLDRLKKVVREVEERLKRLHEESEKVAKDVRRKVEEK

SEQ ID NO: 17422 - protein, 59 aa, Artificial Sequence
  Synthetic
EREVKKIKDDLDRVNEESRRLVEKLERDVTRVRKKIKEELKKNADRLKEVEEDIKRRAK

SEQ ID NO: 17423 - protein, 60 aa, Artificial Sequence
  Synthetic
SEVEELERELKEVVDRVRKLHRESLERNREVVRKVDEDIKKLHRESEEVAKEVEKLIEEV

SEQ ID NO: 17424 - protein, 59 aa, Artificial Sequence
  Synthetic
ERDLKRLEDEARKANKESRDLVREIERHSREAMKRIEEELRRNKERLERVLKKIEDKAR

SEQ ID NO: 17425 - protein, 60 aa, Artificial Sequence
  Synthetic
SEVEKLLEDLKRVAREVEKLLEDLHRRTDEVMKRNEDDIRRLHEESDRVVKRVKDEIEKK

SEQ ID NO: 17426 - protein, 59 aa, Artificial Sequence
  Synthetic
ERDLKRLKDEAKRIEDKIRELLERNREKARRTKEKIKKLVERNRRELEKVLDEIRRRIK

SEQ ID NO: 17427 - protein, 56 aa, Artificial Sequence
  Synthetic
KEVEDVEKRNREVHRRIEKLIEENERRLKEVRDRIRKLVREIEDLNRRVREEVDRR

SEQ ID NO: 17428 - protein, 59 aa, Artificial Sequence
  Synthetic
EEVLRDLLRRNEEVVKRVEDNLRRDTERLEKVAKDVEKKLREVLKRNKEMVDEVRKKTK

SEQ ID NO: 17429 - protein, 60 aa, Artificial Sequence
  Synthetic
SEEEDVLRKLEKIVTDLRETLKRMHEDSERIVEESRKHARKVHEDSKKIVRELKKVLDEK

SEQ ID NO: 17430 - protein, 55 aa, Artificial Sequence
  Synthetic
EEVRRRVEEIRREIERELKRNRERLEEVERENRKLLRENKEELDKVEKDLRDTAE

SEQ ID NO: 17431 - protein, 57 aa, Artificial Sequence
  Synthetic
DDIKRLEDEVRKAAEENKDEVRKNREELKRIKDEIDKLVKDVEETIRRAEDEIRKRV

SEQ ID NO: 17432 - protein, 59 aa, Artificial Sequence
  Synthetic
KRVMEKVLRELKEIVDRSRDHLRRVHEDSKRIADELRRKIEELLKRIKKVVDELREAIR

SEQ ID NO: 17433 - protein, 58 aa, Artificial Sequence
  Synthetic
DDLRRIEKELKRLADRARKINRESDERIKKLEEEIRRINEDSLRRDRDLARRLREMLK

SEQ ID NO: 17434 - protein, 58 aa, Artificial Sequence
  Synthetic
REVKKLKEDLDRVKRELEKLNEEIRDRIRRVKEELKRLNDRSKKHTKEVEEEVERRKK

SEQ ID NO: 17435 - protein, 60 aa, Artificial Sequence
  Synthetic
SEAEDILRRIKRLADENRRILKEILDRIKELADRVRKINEDSLRTLRKLAEELRRVAEKV

SEQ ID NO: 17436 - protein, 58 aa, Artificial Sequence
  Synthetic
EKAERLEREVRKIEKESREMLKRIEDEIRKVEEDLRRLNEELERDVRRVEEEVKRAAD

SEQ ID NO: 17437 - protein, 58 aa, Artificial Sequence
  Synthetic
DELDDIRRRLEKLEEEAERINRESEKRDRELARRIREINKRSKEEDRRLAKEVDEILR

SEQ ID NO: 17438 - protein, 58 aa, Artificial Sequence
  Synthetic
EAVEELRKKIEEVEKKLRRLNEKSKKHTKDVRDELRRLNEDSKRHTDEVKDRLEEATR

SEQ ID NO: 17439 - protein, 60 aa, Artificial Sequence
  Synthetic
DELRKIREDLKRLATEAREINKRSDEDIKRLTDDVRRINKESLERLKKLADDLRDALRKV

SEQ ID NO: 17440 - protein, 58 aa, Artificial Sequence
  Synthetic
EAVKELEEEIRKVKEELKKLNKEIEDKIRDVERELRETNKRLEDEVRRVEEEVRRATK

SEQ ID NO: 17441 - protein, 60 aa, Artificial Sequence
  Synthetic
DDAERILDEIRRLTEELREINKESLKKVERLAERIREINKDSLRRDKELADRLRRMLEEV

SEQ ID NO: 17442 - protein, 58 aa, Artificial Sequence
  Synthetic
EKVERIERTIRKVARELEKLNEDIRKRVDEVEEELKKLNKESEDHTRRVREEVRRRTQ

SEQ ID NO: 17443 - protein, 59 aa, Artificial Sequence
  Synthetic
SELETVEERLKRLEEEIRRLLEKVDRDLDRLADEVRKKNKRSHERNKEIEDRIDKLLKD

SEQ ID NO: 17444 - protein, 62 aa, Artificial Sequence
  Synthetic
EELKKMLRKLEERVKEVTRELEDLLKKAEEKVRRVKDELRRSNKKDEDRLREVEEKLREDSR

SEQ ID NO: 17445 - protein, 59 aa, Artificial Sequence
  Synthetic
SELEEVRKRAKDIADEDRELNRRVHEENKRLADDVRRKNEKSHRDNERIATELRELLRD

SEQ ID NO: 17446 - protein, 62 aa, Artificial Sequence
  Synthetic
EELKKLLDELRKRVEDVKEESKRSLDRDRRELERVKKELDDSNDEDRKRIEEVIKEVRDRSK

SEQ ID NO: 17447 - protein, 60 aa, Artificial Sequence
  Synthetic
DEEREVKERLKELIERLRRLHEESLRELKRIADELRRLHEESHKRNEDIARELERLLAEV

SEQ ID NO: 17448 - protein, 55 aa, Artificial Sequence
  Synthetic
DELERRVRKVEEESKKLHEEIRKRIEEIERESRKLHEDDRRRIEEVLKRIKDAVR

SEQ ID NO: 17449 - protein, 58 aa, Artificial Sequence
  Synthetic
SDEDRLREEAKKVADELRKLHEESHKRNKEIADELRKLHKKSHDDNKRIADEITELLK

SEQ ID NO: 17450 - protein, 55 aa, Artificial Sequence
  Synthetic
EELRDRLRRVEEESRELHKRDREEVERIRRESEKLHREDREDVKRIEKKLRDDAR

SEQ ID NO: 17451 - protein, 60 aa, Artificial Sequence
  Synthetic
DEAEKVLEELRRRAEKVLREVKKVLEDHKRLADELRKELKRVSDENRDSLRRLLEEIDRN

SEQ ID NO: 17452 - protein, 59 aa, Artificial Sequence
  Synthetic
EDLLRRLRELLDEIRKELRDLIRKLRELNDRVERDLRRIIRENRELVRRAEKELEDRTR

SEQ ID NO: 17453 - protein, 60 aa, Artificial Sequence
  Synthetic
DEAEEVLERIKDLARKNEEKNRRVLEEHEKLIRESEERDEKSSRDNKRSVDEIRDIIRRK

SEQ ID NO: 17454 - protein, 59 aa, Artificial Sequence
  Synthetic
EEKIKRIRDELARWAEKIKKTIDELRKLNKEAHDRNRKTIKENEDLVREAKEDLERKTT

SEQ ID NO: 17455 - protein, 60 aa, Artificial Sequence
  Synthetic
SEAEEVLKEIKKLADELRKKNRESVEKVRESSKRLKDEIRKVLEDIKRLAEKLREILREM

SEQ ID NO: 17456 - protein, 59 aa, Artificial Sequence
  Synthetic
EKLLRELEKLIRDIKRELDRSDEKLEELVRRSAKELDDLLDTLREIIERIKRDLDEKLR

SEQ ID NO: 17457 - protein, 60 aa, Artificial Sequence
  Synthetic
REAEEVLKRIKELADEIRKRNRESLERIRKSSEDLKRENEDSIRRVRELIDTLRRRLEKE

SEQ ID NO: 17458 - protein, 59 aa, Artificial Sequence
  Synthetic
KELVDRIRDLIRRIKDELKESDDRIKELIDKSKEDLDKSDEDLKREIDKAREELAKAIK

SEQ ID NO: 17459 - protein, 59 aa, Artificial Sequence
  Synthetic
DEVEELLKEVEELAREIVERLEKNLRDTKKLIDEIEEYARRNEERTRKLIEEAERLARR

SEQ ID NO: 17460 - protein, 59 aa, Artificial Sequence
  Synthetic
EELERRLRRLLEELERRLKRLEDEHRRLVEEVRDKLRKIEETHREIVERVRRTLDEEKR

SEQ ID NO: 17461 - protein, 59 aa, Artificial Sequence
  Synthetic
DDARRLLEEVKELLERSKRHLTKNLEDTRRLIKELLDYARRNLEDTRRLIEEVLDLLKR

SEQ ID NO: 17462 - protein, 59 aa, Artificial Sequence
  Synthetic
EEVKETLKRLLDEIRRENEKVARDHKKLVDDVERELEDIERRHKELVDRARKVAEDEKK

SEQ ID NO: 17463 - protein, 59 aa, Artificial Sequence
  Synthetic
SDAERILDEVRKLVEDSKRHLDENLKRTAELSKRSKEYAEENLDRTRRLAKEAADIARR

SEQ ID NO: 17464 - protein, 59 aa, Artificial Sequence
  Synthetic
EKVKEDLKRLLDEIRKENKRAEDAHRDLARRSREELEKAERKHKELVDRIRKALEEIKK

SEQ ID NO: 17465 - protein, 59 aa, Artificial Sequence
  Synthetic
DEVRKLLKDVRELAREIERRLEENLRRSEELLKRIEDYLRKNLEDTRRLIEEVKELADR

SEQ ID NO: 17466 - protein, 59 aa, Artificial Sequence
  Synthetic
EEFKDRLRRLMKRIKERLEDVKRRHKELVKKARKSLEEVKRRHRKLVEDVRRTLEEEKR

SEQ ID NO: 17467 - protein, 59 aa, Artificial Sequence
  Synthetic
DEARKILEDLKRLAEESIRHLEENLRRSEKLVEDVERYAEENLERTKKLVRDVDEIIRR

SEQ ID NO: 17468 - protein, 59 aa, Artificial Sequence
  Synthetic
EEVKKRLEDLAREIRKANEDVKRRHKKLVDDVRKRLKEIEKKHRDLVRKIEEKLRDARK

SEQ ID NO: 17469 - protein, 59 aa, Artificial Sequence
  Synthetic
SEAEELLKTVRDLVEKSRKHLKENLKRSEELSRKSKEYADKNLERTKRLVKTVADILDR

SEQ ID NO: 17470 - protein, 59 aa, Artificial Sequence
  Synthetic
KKLEDELRRLVEEAKRENDEVRREHKRLVEDSERKLEKIERDHRELVDRVEKEMREKKR

SEQ ID NO: 17471 - protein, 59 aa, Artificial Sequence
  Synthetic
SDVERILEDLDRVVKESKRHLEENLRRSEKLTREVEEELKRNLKESEELVKRVEDIARN

SEQ ID NO: 17472 - protein, 59 aa, Artificial Sequence
  Synthetic
EDAKRRLRELVEKVKEDNKKVKEEHDDLVRKVERRLEEIRKRHEELVRRIRRRLEEEKR

SEQ ID NO: 17473 - protein, 59 aa, Artificial Sequence
  Synthetic
SDVEELLRRLEELLKESEKHLTENLRRSEKLVRDSKRHLDENLKRSKDLAREVVRLAEK

SEQ ID NO: 17474 - protein, 59 aa, Artificial Sequence
  Synthetic
RKVKERARELVERIKRRNEKVERDHEELAREVRERNKEVEKRHRDLVEELRRRLDERKR

SEQ ID NO: 17475 - protein, 59 aa, Artificial Sequence
  Synthetic
SEAEELLERVKKLTDESLRYLEENLDRLRKLVKESEDHLKDNLRKSEKRVREVIDLARR

SEQ ID NO: 17476 - protein, 59 aa, Artificial Sequence
  Synthetic
KDMEDKLRRLVEESRRALEEVLKRHEDLVEEVRKSNDKVRKEHEELVKRVRDALREIKR

SEQ ID NO: 17477 - protein, 55 aa, Artificial Sequence
  Synthetic
SVEERLEKLLKEAEERLRESEDRTRKLVEEVRRELEKLKKRSKELADRVREELRK

SEQ ID NO: 17478 - protein, 59 aa, Artificial Sequence
  Synthetic
EEELEKILDTLRRIAEKLVRKNEDILRRLKEIVKKVIRENEEILRRLEEIAKELAKRLE

SEQ ID NO: 17479 - protein, 55 aa, Artificial Sequence
  Synthetic
SLDEEAKRVVEEVRKRLRESKERSREIVERARRELERLKEESKRLADRIREEVKK

SEQ ID NO: 17480 - protein, 59 aa, Artificial Sequence
  Synthetic
TELVKRLLDDLRRIIRELEEKNRALNETLRKIVEEAIKKNREILEELREEVDRVRKRLK

SEQ ID NO: 17481 - protein, 60 aa, Artificial Sequence
  Synthetic
SEVEKVLREAREILKKNKRENEEVHKKSKEIAERNREKNEKVHRDSRKIIEELKELADRG

SEQ ID NO: 17482 - protein, 56 aa, Artificial Sequence
  Synthetic
EDEARKLVKEVRETLEDSARRDEKLIEDLKRTLDESKKEDDKLIEELERRLREAER

SEQ ID NO: 17483 - protein, 60 aa, Artificial Sequence
  Synthetic
SEVEKVLREAEEIAKKNEEDNRRVNDRSEKIIEENERRNRKVHKESEDIVRDLERLAAEG

SEQ ID NO: 17484 - protein, 56 aa, Artificial Sequence
  Synthetic
EEEVRKLVEKLERLLEKSKRDDEESIKKARELLRRSEEADKKLIREAEEAIRTRKK

SEQ ID NO: 17485 - protein, 60 aa, Artificial Sequence
  Synthetic
SRLEELLKKAKKLVEDVEDTNRKMLEKLRKLADDLRRINKRVLDELERLARELEDIARKI

SEQ ID NO: 17486 - protein, 59 aa, Artificial Sequence
  Synthetic
EEVLRELKKLLDEAKKKLEEIDKRLEDELRKIEDDLRRSNERVRRLLEEVRRRIKEETD

SEQ ID NO: 17487 - protein, 60 aa, Artificial Sequence
  Synthetic
DELEEMLKRLEKLARDLDRINKEVLRRVEEEVRKLEEENEEVLRTLRRLAEEVERILDEI

SEQ ID NO: 17488 - protein, 59 aa, Artificial Sequence
  Synthetic
KEVLDKLEKLLEDIARELEKSNRRLEELLKEVERRLREMDERLRKELEEVKRRLEEKRR

SEQ ID NO: 17489 - protein, 60 aa, Artificial Sequence
  Synthetic
SRVEKVLEELKELMKELDDSNRRVLEELERLVRENTRRNEEVLRRVRELAERLKDELDKI

SEQ ID NO: 17490 - protein, 59 aa, Artificial Sequence
  Synthetic
EELLRRAKELLKRIKERLEESDRRLKRLLDEARKRSEDIIRALEKLLRDVKRELEEKLR

SEQ ID NO: 17491 - protein, 60 aa, Artificial Sequence
  Synthetic
KDAERLFEDLRRLVDENREKNEKVLREIEERVERLERENEKVLRDLEDLIRRVREEIDRT

SEQ ID NO: 17492 - protein, 59 aa, Artificial Sequence
  Synthetic
EEMLRELKKLLDRAREESRRIIEELERTLEKVKERLDRTDKEIEELLKRAEEELREKER

SEQ ID NO: 17493 - protein, 60 aa, Artificial Sequence
  Synthetic
DDLERLLKEVKERIDEVKRRNEEVLKRLRELVKRNKEKNDRVLREAEKLMKKLRDIVRKI

SEQ ID NO: 17494 - protein, 59 aa, Artificial Sequence
  Synthetic
EEVLRRLRELLRTAERELEESNRRAEELLKDARRKSEEIIRRLERLLEEVDRDIKRALK

SEQ ID NO: 17495 - protein, 60 aa, Artificial Sequence
  Synthetic
DDVRELLRTLRKISEDTLRRVEEINRKLERLSRETLKRVEDINRKVKELMEEVLKELDRI

SEQ ID NO: 17496 - protein, 59 aa, Artificial Sequence
  Synthetic
EDALRELKRLVDDNETKLRRLRDTHRELLERNRTELEKLKRTHKKLVDEAEEELRKKDK

SEQ ID NO: 17497 - protein, 60 aa, Artificial Sequence
  Synthetic
SDVERLLEKLRDLSRRTVRELERINEEVREIIKTLKKELDRTNKELRDIIEEIKKELDKI

SEQ ID NO: 17498 - protein, 59 aa, Artificial Sequence
  Synthetic
EKLLDELRRLLEENEKTLEDVRRTHEELVKRAKRELEKNIEEHERLVRDVKEKLERKIR

SEQ ID NO: 17499 - protein, 60 aa, Artificial Sequence
  Synthetic
SDAEELLKEAREVSKRTKDTLDEINKDVKRISEETKKRLKKTNEEIKEIADRLRKELERI

SEQ ID NO: 17500 - protein, 59 aa, Artificial Sequence
  Synthetic
EDILRELKKLVDDNRKTLKEVLETHEELLRDNSRKLERNVERHAKLVRDIKEELKETTR

SEQ ID NO: 17501 - protein, 60 aa, Artificial Sequence
  Synthetic
SDAERLLKEVEEIARRLEKKMRETNKEVDRIVKEIEDDARRLNKELREIAERIKDELDKI

SEQ ID NO: 17502 - protein, 59 aa, Artificial Sequence
  Synthetic
EKVLKELKRRLEEIKKKLDDNLRRHKKKVDDVARELEKIVKTHRDLVEEIRRRLRKKEE

SEQ ID NO: 17503 - protein, 59 aa, Artificial Sequence
  Synthetic
SDAERLLEELKRISEETKRRLAETNKKVKKIMKELTETLTETNKKLKKIIDDLRDRIDK

SEQ ID NO: 17504 - protein, 59 aa, Artificial Sequence
  Synthetic
ERVLKELRRLLERNREELRRNKEKHKELVERIKRRLEENKERHKRLVDEARKELKEKEK

SEQ ID NO: 17505 - protein, 60 aa, Artificial Sequence
  Synthetic
KDAEELLKTLERLSRETKRRLERTNRELKEISKETEKDLERTNRKLKEIIDRLREELDKI

SEQ ID NO: 17506 - protein, 59 aa, Artificial Sequence
  Synthetic
EEMLRELRRLVEENKKRLRENIRRHERLLEENRRKLEKNIRDHERRLEKADKDLEDKRR

SEQ ID NO: 17507 - protein, 60 aa, Artificial Sequence
  Synthetic
KDAERLLEEARRIVKEADDILRELDEEVRRIVEKIKRDAERTNEEIREIAKRIRDEIERI

SEQ ID NO: 17508 - protein, 59 aa, Artificial Sequence
  Synthetic
EDVLRELRKLVEDVKRRLKEVADHHRELVRRAEEELKKNRDEHERLVREIEKELRKARE

SEQ ID NO: 17509 - protein, 60 aa, Artificial Sequence
  Synthetic
DEAERLLERVKELMERLTEEARRTNETLREIVERAERRLRELDERVRKIAEEIRRRLEKI

SEQ ID NO: 17510 - protein, 59 aa, Artificial Sequence
  Synthetic
EKVLTKLRKLLEDIRRRLEKNLKDHEELVRRVEEKLKRVREHHEELVRRIKEELDKAEK

SEQ ID NO: 17511 - protein, 63 aa, Artificial Sequence
  Synthetic
RDAEELLRTMEEITRRVKKELEDLLRTDEELSERVKEEARKLDEKLKELARDVTEKARDIKKG

SEQ ID NO: 17512 - protein, 59 aa, Artificial Sequence
  Synthetic
DEVKKELKRLIEEVRDRLKKVKDTLEKLIKENEDELRKVEEHHEKLLREIEETLERMRK

SEQ ID NO: 17513 - protein, 63 aa, Artificial Sequence
  Synthetic
EEAERLLKKAEDLSRDTARKAKELLEEDEKLVRDAEKKARELDRELEKLAEEAARAATRAKKD

SEQ ID NO: 17514 - protein, 59 aa, Artificial Sequence
  Synthetic
EEARKRAEDLIRESEKRARDAKRRAKELIDRSRKSAKEAKEHHEKLIKEARDELEKAKK

SEQ ID NO: 17515 - protein, 60 aa, Artificial Sequence
  Synthetic
DEAEKLLRELEKLSRETEKRVREIIKKDRDLSEEVRRRAERLDDELRKLVEDAERELRRI

SEQ ID NO: 17516 - protein, 59 aa, Artificial Sequence
  Synthetic
DKVRKRLEELIRESDERLKELTKELRKLIEDNRRELEKIIRHHKRRVDEVRKRMTELRR

SEQ ID NO: 17517 - protein, 61 aa, Artificial Sequence
  Synthetic
SEVEDLLRRLEEIVKRNDDELRADEERTRKIIKENKETLDRLLEDLKRILRELEKIVRDKG

SEQ ID NO: 17518 - protein, 59 aa, Artificial Sequence
  Synthetic
EEAKRRAEEKLKRLEERSREIERRLKKLNEELKRISDEVEKTAREILERIKRRIEEEER

SEQ ID NO: 17519 - protein, 61 aa, Artificial Sequence
  Synthetic
SRVEKLLDDVRKILEDNERRLRDDMRRTEEIIRKNKRDLERLKERHEEIVKRLDEIIKKEG

SEQ ID NO: 17520 - protein, 59 aa, Artificial Sequence
  Synthetic
EDARREAERLLKEVEDTSREAEKRLRELNEELERRSRKVEEELKKSDEELKRRIEEAER

SEQ ID NO: 17521 - protein, 60 aa, Artificial Sequence
  Synthetic
SIEDRLRKIVRDLEKVLRDLKREHDDVVRELEKRLRDIEERHRELVEELKKRIEEIERER

SEQ ID NO: 17522 - protein, 59 aa, Artificial Sequence
  Synthetic
EKDLEELLKELEDIIREVRKRAKENLDRTRKLIKDIEDYLKKNLDRVRKLIEDITRALK

SEQ ID NO: 17523 - protein, 60 aa, Artificial Sequence
  Synthetic
SIEERLREVERRLREDLKRLEKAHRDIVRDIERTLRKVEEDHRRVKEKLKRTIEDVERRR

SEQ ID NO: 17524 - protein, 59 aa, Artificial Sequence
  Synthetic
EKELEKLLRDLKRIIDEVRKYATRNLEELKRVLKRVKEEAEKNLERTERLIEEIRRRAE

SEQ ID NO: 17525 - protein, 60 aa, Artificial Sequence
  Synthetic
SIEETLREIVKDLERVLEEIERRHREIKKELEDILRELKKRHEDVVREAEKELRDAKRRR

SEQ ID NO: 17526 - protein, 59 aa, Artificial Sequence
  Synthetic
REELKRLLDELKKLIDRVREEAKKNLDRSKKMIEDVERYARENLRRTKELIDDVKEKLR

SEQ ID NO: 17527 - protein, 60 aa, Artificial Sequence
  Synthetic
KIEEEVDKVRRTLEKELKEIDERHKRIVEKLREELKEAEKRHEELVKRAKEELDDVKRRE

SEQ ID NO: 17528 - protein, 59 aa, Artificial Sequence
  Synthetic
EDLLRKLLEELDRIRKEVRERLKRNLDRLKKLIDEVREYLERNLRRTKKLIDRVREDAR

SEQ ID NO: 17529 - protein, 60 aa, Artificial Sequence
  Synthetic
DVEEELRELIERLKEVLDRLREESKRVIKELRDTLRELEERSRDIIRKLEETLRDVARKS

SEQ ID NO: 17530 - protein, 59 aa, Artificial Sequence
  Synthetic
DEFLRRVLERAKKIVRKLEEDARRVLEETEDLIRRLREKAERVHEKTKKIIKEITEELK

SEQ ID NO: 17531 - protein, 60 aa, Artificial Sequence
  Synthetic
SVEDALRKLIEELKRVLKKLEDDSRRIIEELRKVLKDLEDRSRKVIEEIKDDLRKIAEKS

SEQ ID NO: 17532 - protein, 59 aa, Artificial Sequence
  Synthetic
EEVAKRLLDKARDIVRTLKEEAERVHERSRRIIEELRREAEEVLEETRDILRRLREEAK

SEQ ID NO: 17533 - protein, 60 aa, Artificial Sequence
  Synthetic
SELEKVLEKLKDLLRKVREKNERVLREVEERTRRVKRDLERVLKEAKDILRKAKKLADDG

SEQ ID NO: 17534 - protein, 59 aa, Artificial Sequence
  Synthetic
EEIARRIKKVLDDWKRVSEESKRRIEELLKRDKEELEKIKRAAKKVIDELKRLLEEAER

SEQ ID NO: 17535 - protein, 60 aa, Artificial Sequence
  Synthetic
SRAEEILKRLEELIKRLKEENDRVLEENKRLIEELEKKNRDALRRIEELLKELKDIARRI

SEQ ID NO: 17536 - protein, 59 aa, Artificial Sequence
  Synthetic
EDLEEKLRRLLDELRKISEEVEERSERSNKELEDVSEDSKRKLRKILEDLRDLLRRTEK

SEQ ID NO: 17537 - protein, 60 aa, Artificial Sequence
  Synthetic
SRAERILEEMERLIEEVRKENERVLRENRRLIKELKEENERILRELKRLIKEAKEIVERI

SEQ ID NO: 17538 - protein, 59 aa, Artificial Sequence
  Synthetic
EEVDERLERLLKTAEDDSRRSDKRSEDSNRELRKVSEDSRKRLEELLKDAERKLREDEK

SEQ ID NO: 17539 - protein, 60 aa, Artificial Sequence
  Synthetic
DDVDRILEELKRLVEENRKRNEDIERELEKLIKEVEDSNRTMLERMEDLIRELRDIVRRI

SEQ ID NO: 17540 - protein, 59 aa, Artificial Sequence
  Synthetic
EDAERRLKELLEDAKRVSDEVLRRLTELLKKAKDVSDESRERLRRLLEDLERDLKRERT

SEQ ID NO: 17541 - protein, 60 aa, Artificial Sequence
  Synthetic
SDAERLLRELERLVEENRRRNKKVLDDNERLVEKLEKSNRRALEELKELVDRLEDIARRI

SEQ ID NO: 17542 - protein, 59 aa, Artificial Sequence
  Synthetic
ERVREELERLLEEAKRDSDEVRERSKKSNKKLEDVSRKSKKDLRDLLKKARDILKETER

SEQ ID NO: 17543 - protein, 60 aa, Artificial Sequence
  Synthetic
SDAEEVLKELERLIREVEERNKDILRKAKELVRDNERKNREVMERLKKLIEDLKKIAKEI

SEQ ID NO: 17544 - protein, 59 aa, Artificial Sequence
  Synthetic
EEVEKRLKDLLREAEEVSRRSEERLRELLKELEDVSREVKRRLERILEELKRILDEVEK

SEQ ID NO: 17545 - protein, 59 aa, Artificial Sequence
  Synthetic
DEVEELTERLKRVLEDNRRTAEEVKERTRRVIDKVRRDYEELEKRLKKILKEIEDLSRE

SEQ ID NO: 17546 - protein, 56 aa, Artificial Sequence
  Synthetic
EDTVRRLIKEAKDDNDRMEEENRRLIRELEEVSKRAHKRLRELIRRIEELLRREET

SEQ ID NO: 17547 - protein, 59 aa, Artificial Sequence
  Synthetic
SAEEEVRKIKREIEKVLRESEREIERVEKEIRDVLRKSEREIERVKREVDKVLEEVRRA

SEQ ID NO: 17548 - protein, 56 aa, Artificial Sequence
  Synthetic
LEDLLREVKKAIEKNEKDNRDVLREVEEKIRRDEKRNKEVLEDAKRKIEELKKRAD

SEQ ID NO: 17549 - protein, 59 aa, Artificial Sequence
  Synthetic
SAEDAIREVERKAREVLKRSKEEIDKVVKKAEEILKRSKDEVKKVADEIRRILEEVRRA

SEQ ID NO: 17550 - protein, 56 aa, Artificial Sequence
  Synthetic
LEDVLRRIEKIIRDNAEENKRVLEEAEEVLKKDEKDNRDVLEELKKILEELKRKAD

SEQ ID NO: 17551 - protein, 59 aa, Artificial Sequence
  Synthetic
SVEEAVKRLADEIRKVLERSKEELERVAKEAEDVLRRSREELKKVADEVRKVLDDVRRA

SEQ ID NO: 17552 - protein, 56 aa, Artificial Sequence
  Synthetic
LEDALRRLKEIIDENKRENEEVLKRAREIIEENKKRNKEVLDEAKEIIDRVREKAR

SEQ ID NO: 17553 - protein, 59 aa, Artificial Sequence
  Synthetic
SAEDAIRKIAEDAKKLLEDSRRELRRVVEKVKRLLEKSKEDLDRVAEEVKKVLEEADRA

SEQ ID NO: 17554 - protein, 56 aa, Artificial Sequence
  Synthetic
LEDAVREVREVLKKNKEDNDRVLREAEEVLKRNEEENRKVLEEAKRIIDELKKRID

SEQ ID NO: 17555 - protein, 60 aa, Artificial Sequence
  Synthetic
SVREELTRVKKRARDVLERSREEAERVAKRAEEVNRESEREIERVLEEVERILEDIREKV

SEQ ID NO: 17556 - protein, 59 aa, Artificial Sequence
  Synthetic
EEAVRDVLRKVREIIRRNRKENEEVLRDVERLIRELEERNRRVLKKAKEILKRIRDKAE

SEQ ID NO: 17557 - protein, 60 aa, Artificial Sequence
  Synthetic
SVEEELEKVKRKAEKLLEDSDREIKRVTKKAEKVLEDSRKAVEEVEKEVKEVLDEIRANV

SEQ ID NO: 17558 - protein, 59 aa, Artificial Sequence
  Synthetic
EKKAREVLKKVEDRIEENRRRNEEVLEKAEKIIEDNRRKNKTELDKVKEIIRRIREEAR

SEQ ID NO: 17559 - protein, 59 aa, Artificial Sequence
  Synthetic
SAEDALRKLKEDSKRVNDESRREAERLKREIEKINEDSDREVEKVKKKIEELLEKVERD

SEQ ID NO: 17560 - protein, 59 aa, Artificial Sequence
  Synthetic
ERELKRVLEEVERLIEKVKTDNKRVLDEIRKILEEIERKNRKVLKEVEDLLKTMEDEAR

SEQ ID NO: 17561 - protein, 59 aa, Artificial Sequence
  Synthetic
SLEEAVREVERKAKKVNDDSREEVKKVKKESKDVNKKSEDDARRVVEEIKKILKRIAEK

SEQ ID NO: 17562 - protein, 59 aa, Artificial Sequence
  Synthetic
ERLAKKVLDEVEKIIEDIKRRNEEVLRRVREDIKRVEEENKKVLKRVKERVEEMRRRAD

SEQ ID NO: 17563 - protein, 59 aa, Artificial Sequence
  Synthetic
EMEDEARKVIKKIKEVNRRSREESEKLSRKSERVNRESKRASEELREEIRRVLEEIRRK

SEQ ID NO: 17564 - protein, 59 aa, Artificial Sequence
  Synthetic
RRKMKTVLDEVEKEIRRIEEENKKVLKESEDLIREVEKENREVLERTKRIIDEARKRAD

SEQ ID NO: 17565 - protein, 59 aa, Artificial Sequence
  Synthetic
SVDEAVKEVEDRLRKVNEESTRESKKVVDKARDVNRKSEEASRELEDRIEKVLTDIRRK

SEQ ID NO: 17566 - protein, 59 aa, Artificial Sequence
  Synthetic
ERLAKRVLDEAKRILDEVKEKNRRVLEDSERIIKEVEDRNRRVLEETRRIIEELRKEAD

SEQ ID NO: 17567 - protein, 59 aa, Artificial Sequence
  Synthetic
SVEEMVKELIRKLREVNKRSADELDRVRKRMKKLNDDSRKAVKEVREKIERLLDAARRR

SEQ ID NO: 17568 - protein, 59 aa, Artificial Sequence
  Synthetic
ERLAEEVLRRVEKKIEDIRRRNEKVLRELEKILREVSEENERVLRDLERKLRKLAEDDR

SEQ ID NO: 17569 - protein, 59 aa, Artificial Sequence
  Synthetic
SVEDEIRKVKDELRRVNEKSTRDSKRVRDRMETVNRESEKRARDVKKRIKEVLDKIRER

SEQ ID NO: 17570 - protein, 59 aa, Artificial Sequence
  Synthetic
KRLADDVLRKVRDEIRKIEEDNREVLRRSEDILRKIKERNKKVLDDVRRKIDKARRDAE

SEQ ID NO: 17571 - protein, 59 aa, Artificial Sequence
  Synthetic
KAEEAAERIKKKLEDILKRAKEESEKILDKLREVLERSKRKHEELIRRAEEVLKDIARK

SEQ ID NO: 17572 - protein, 55 aa, Artificial Sequence
  Synthetic
RDVLTELEKIIKELEKRAKEVLDTSRKSIEDLERRNEESLKRLTDDLKRAKEEAD

SEQ ID NO: 17573 - protein, 60 aa, Artificial Sequence
  Synthetic
SEVEEVLKRLEELLRDSERKVEEMERRLKEIIDRLREEAKRVLDESKESSKRLDELAKKG

SEQ ID NO: 17574 - protein, 59 aa, Artificial Sequence
  Synthetic
EEADRALRDLERKHEKRVREVDDRLKKIEDELKRVVEEIRKRLEDLKEENRRIVDRTAT

SEQ ID NO: 17575 - protein, 60 aa, Artificial Sequence
  Synthetic
SDVDEVLKRSEDSTRRLRERAERMLEELERLIRESKRTADEVLKRSRESSKRLDEEVRAG

SEQ ID NO: 17576 - protein, 59 aa, Artificial Sequence
  Synthetic
EEVRKELERLRRENEKVVREAKKRLEDIIRKHEKIVKEIKEALDKLLEDNKRIVDRTSK

SEQ ID NO: 17577 - protein, 60 aa, Artificial Sequence
  Synthetic
DELEDVLRKAKELIKRDRDEVRRVLEELKRSTEDLRRKVRDVERRLKELIDELDDIARKI

SEQ ID NO: 17578 - protein, 55 aa, Artificial Sequence
  Synthetic
KELEKIKKELEDVIRETRERLKKVLDETREDIKDVDRRLRKLEEEIRRKVEEDER

SEQ ID NO: 17579 - protein, 60 aa, Artificial Sequence
  Synthetic
SELEEIIERIKRLIEEDRETVKEVLERLRRLSDEDRKEVKRVLREIKELIKELEDLRRRI

SEQ ID NO: 17580 - protein, 55 aa, Artificial Sequence
  Synthetic
EELERLKEEAKRVIKRTRDELEKILRENRELIDRSRKELRDLEKELRDVVRESER

SEQ ID NO: 17581 - protein, 60 aa, Artificial Sequence
  Synthetic
SVREELEKLVRELRRLLEKSKRDTDRLSEEMEELNRRAEELIRTIERRLRELLRKIRENV

SEQ ID NO: 17582 - protein, 59 aa, Artificial Sequence
  Synthetic
EKLVEELKRRAKKVIRELEELSRRATEEVKRVLKENEDLVREVEKDLEEILKRIKDRAD

SEQ ID NO: 17583 - protein, 60 aa, Artificial Sequence
  Synthetic
SLEEELKKLEEEVRRLLEKSKEDTDRLKKEIEDLNKKAEDDVREIRKELEKLLRDIARNV

SEQ ID NO: 17584 - protein, 59 aa, Artificial Sequence
  Synthetic
EELAKRLSDKFRRILEKLEEDSKRALDKAREILKRNEELLRELLEELRRILEEIERRAR

SEQ ID NO: 17585 - protein, 60 aa, Artificial Sequence
  Synthetic
KAKEELDRLRKEARDLLEDSKTKTKRLVEEMDKVNEDSKRESKKLLDELEKLLRDIEKRV

SEQ ID NO: 17586 - protein, 59 aa, Artificial Sequence
  Synthetic
DKLVEKLREEVERILERVKELSKKAIDEVKEVIKRNRDLSKRVIERAKEILRRIEEKAR

SEQ ID NO: 17587 - protein, 60 aa, Artificial Sequence
  Synthetic
SVEDELRRIEEEMKRLNEKVERDSRRVLKEVEDLNREIKKRSDDLEREIRRLLEEVKRRK

SEQ ID NO: 17588 - protein, 56 aa, Artificial Sequence
  Synthetic
IRELLKELRKILDDNRETARKVLEDSKRIIERNKREAEKLERRSRKILKDIEDEAR

SEQ ID NO: 17589 - protein, 60 aa, Artificial Sequence
  Synthetic
SVEEELRRLEKRIEELVREIERRLRELKKEVEELNERIKRASDEILDRIRRLLEEVRRRK

SEQ ID NO: 17590 - protein, 56 aa, Artificial Sequence
  Synthetic
VRDVLREVERIIRELEERARDLLRRIREIIRRNEEKLERLLRRSKEILKEIEERAK

SEQ ID NO: 17591 - protein, 59 aa, Artificial Sequence
  Synthetic
STERKLEELEKEAEKDLKEVEDRLKELNDHHDKRVKEVEDRLRRANKHHRDRLEDIRRR

SEQ ID NO: 17592 - protein, 56 aa, Artificial Sequence
  Synthetic
TDEVLKRLKDLIKELRDEVRKVLTEHREIDKRVEEEVKRVLDEHREIDKRLDEETK

SEQ ID NO: 17593 - protein, 59 aa, Artificial Sequence
  Synthetic
SSKEKIERLREKLEDLVRRVRKRLRELNEHHKELVKRIEDTLRELLRHHDELLKEAERR

SEQ ID NO: 17594 - protein, 56 aa, Artificial Sequence
  Synthetic
TEDVLRRIEELIERLKREVDRVEREHERIDEEVRKRAEDIERRARDIDREVKETTR

SEQ ID NO: 17595 - protein, 59 aa, Artificial Sequence
  Synthetic
SVRETLERMLRHHAELVERVRRELRKLNKHHRDEVKRVEERLDELRKHHEELLRRAEKD

SEQ ID NO: 17596 - protein, 56 aa, Artificial Sequence
  Synthetic
AKKVVEDLRRINERVKDEVRRALREHERIDKEVREIVEEIERRAEKIDEELKRTID

SEQ ID NO: 17597 - protein, 59 aa, Artificial Sequence
  Synthetic
SVEEALTEIKKRLDKKVEDIERELKKLLDHHKELVDDVRRKLEELNRHHDRLLDEIRKD

SEQ ID NO: 17598 - protein, 56 aa, Artificial Sequence
  Synthetic
KDEVLKRLEDLIRELDRRVKEIEKRAEEIDRELEDRVRKVLDEHRKIDERAARETD

SEQ ID NO: 17599 - protein, 59 aa, Artificial Sequence
  Synthetic
ETKERLDEILKHHEEEVKKVRKRLDELLRHHEELVKEVDKRLKEMNDHHRRLLDEADKD

SEQ ID NO: 17600 - protein, 56 aa, Artificial Sequence
  Synthetic
KDDVLRRLEDINRRLEERVRKAERRLEEIDEKAERITEKVKREHEDIDRRVEDIKR

SEQ ID NO: 17601 - protein, 59 aa, Artificial Sequence
  Synthetic
SVKERLDEVRRHHEDEVRRVDEKLKEILRHHEEEVRRVDKELKELLDHHKELLDDAERR

SEQ ID NO: 17602 - protein, 56 aa, Artificial Sequence
  Synthetic
AEEVKKRLDDINKRVEEIVREIEERLRRIDEKLKEIVRKAAEDIRRIDKEVEDEIR

SEQ ID NO: 17603 - protein, 60 aa, Artificial Sequence
  Synthetic
SLEELLKKIEERLRDLSRKVAEELKRILDELRELSERAKDLNRRVNETLRKLVEDITRRD

SEQ ID NO: 17604 - protein, 59 aa, Artificial Sequence
  Synthetic
EEDVKKVLDELEKLLKDNEELNRRVRKELKDLLETLRKLNERSKEELDKLIKELEDRAR

SEQ ID NO: 17605 - protein, 60 aa, Artificial Sequence
  Synthetic
REVEEILRKLKEITDRTRDLSRRNEEELRRIIRELEEMSKRNKREVEEIIKEAKELAKRT

SEQ ID NO: 17606 - protein, 59 aa, Artificial Sequence
  Synthetic
EKAREDLDRLRRENEELIERSERINKKIKEELERVIKRSEDLNKKLEEDLEKLIRDETR

SEQ ID NO: 17607 - protein, 60 aa, Artificial Sequence
  Synthetic
EEVERILTKAERVTRETERLSRENEKELKKITDETRRLSEKNIEDIERIIEEMERLARTT

SEQ ID NO: 17608 - protein, 59 aa, Artificial Sequence
  Synthetic
EDARRELKRLEEENRRLLEESEERNRRIEERNEELIEESERRNRELEKRLRDLIKETRD

SEQ ID NO: 17609 - protein, 60 aa, Artificial Sequence
  Synthetic
SAEDSIRRAEEEARRLIKRAEEEAEKSARRHKELNERARKRAKESAEEAEKLIREAARSG

SEQ ID NO: 17610 - protein, 56 aa, Artificial Sequence
  Synthetic
ARDLEEKAKKALEKAERIARKNAEDNERNLEKSKRIAERNAKKNEEALREIAKKAN

SEQ ID NO: 17611 - protein, 59 aa, Artificial Sequence
  Synthetic
SAREDIERLVKELKELVERAREAIKRSAEEHKKLNKELKDRIKEVVERLKKLIDDARRD

SEQ ID NO: 17612 - protein, 56 aa, Artificial Sequence
  Synthetic
AEELLKKAKRVIEKAEKILRENKEENERNLATSEKIARDIEDKLRKVLKRIADEIR

SEQ ID NO: 17613 - protein, 59 aa, Artificial Sequence
  Synthetic
SAEDKLREVEKHHEKLVRDIRRKLEKNLRDHAEKVDRVRKKLEEAERRLKELVDRVRKD

SEQ ID NO: 17614 - protein, 55 aa, Artificial Sequence
  Synthetic
ERVDRDLERLDREVEEIARRLTRLMEESNKRLEDIVRTIEERIKEILERLKRTAK

SEQ ID NO: 17615 - protein, 60 aa, Artificial Sequence
  Synthetic
SDVEKIIKDLEKVIDDNRRTNEKAIRDAEDIIRRSEEHSRKVIEKLKKIIKEVKEEAERL

SEQ ID NO: 17616 - protein, 56 aa, Artificial Sequence
  Synthetic
EEEVRRVEEEIKKLLEDSRRLLRRIEEESRRLDEEDERLMKEIDDEIRELLERIRR

SEQ ID NO: 17617 - protein, 60 aa, Artificial Sequence
  Synthetic
KEVEDIVDEARKRIDTVRKESKRVVEEVERRIEENKRRNEEVIKRVREDIDRVRKEADKL

SEQ ID NO: 17618 - protein, 56 aa, Artificial Sequence
  Synthetic
REELERLRREVEKLEEDDRRLLEELEKRARELLERSKKLLDEIRREMEELLKRIRT

SEQ ID NO: 17619 - protein, 61 aa, Artificial Sequence
  Synthetic
KEVEDIIREVEKRIRDSERHSKEVLDRAEEVIDDNRRKNEEVIKEAEEIIDRIRREADRLK

SEQ ID NO: 17620 - protein, 56 aa, Artificial Sequence
  Synthetic
KDLLKEVEERSRRVIEKDRELLKRLEDKVRKLVEDSRRMVKRIEEEIRKLLEDIRR

SEQ ID NO: 17621 - protein, 60 aa, Artificial Sequence
  Synthetic
SELEKIIEDIKRLIDELRKLVEDVERRNRKLSEDDKRLVEEVLKRLDELIRRLREIAKKI

SEQ ID NO: 17622 - protein, 55 aa, Artificial Sequence
  Synthetic
ERLDELRERLKRLEDEVRRRLEELERENRKIIEETEEALRRIEEKARKELEEVDR

SEQ ID NO: 17623 - protein, 60 aa, Artificial Sequence
  Synthetic
SELDDIIRKIEELIRDDERKVRKAVRENEDLSRRDEERVRKVIDEARKLLKRLEEIAREI

SEQ ID NO: 17624 - protein, 55 aa, Artificial Sequence
  Synthetic
EKLDELRKRLEDLIRETEKELRRLERENDEIEKRTEDLLRRLREELRRIVEEVER

SEQ ID NO: 17625 - protein, 60 aa, Artificial Sequence
  Synthetic
DDLERIIEEIERLIRTLEELVRDALRKSKRLLEENKKLNEEVLRRIKDLIRRLEEIARRI

SEQ ID NO: 17626 - protein, 55 aa, Artificial Sequence
  Synthetic
EELDKLREELKRLVDRVEEMLRKSEEDTERIIRKSEEDLERLERDLKRLVEEVRR

SEQ ID NO: 17627 - protein, 60 aa, Artificial Sequence
  Synthetic
KELEDIIREAEKLIEENSRKNKEMLDRSKELIERNERKNRDVIRRLEELIEDLRRIAEEI

SEQ ID NO: 17628 - protein, 55 aa, Artificial Sequence
  Synthetic
EELDRLRKKLEDNIRESEKELRRSEEETKKLIDDSERELERIERRARELLERVRR

SEQ ID NO: 17629 - protein, 60 aa, Artificial Sequence
  Synthetic
SDVEDLLRKIKKILREIAEESKRTVRENEELTDRVKKKIREIVERIRRIIKELEERLRRI

SEQ ID NO: 17630 - protein, 59 aa, Artificial Sequence
  Synthetic
KDVEDKLRELERELKKIEDDSRRLLKRLEEENRTLVKEVRERLKRLEDDVRKLKEDVTT

SEQ ID NO: 17631 - protein, 60 aa, Artificial Sequence
  Synthetic
DEVDKLVEEIKKIIEDVRRESDKTVRDNEELTKKLAEDSKRSLDEIKKLIEELRKEIERI

SEQ ID NO: 17632 - protein, 59 aa, Artificial Sequence
  Synthetic
EEVERKLKKLKEELERLVEESRRKLEELKKRNEELVRRSREELDKLRREVKETLERVKR

SEQ ID NO: 17633 - protein, 60 aa, Artificial Sequence
  Synthetic
SDAEEILKEIERLIREVEKTSRRTVEEDERVTEEVRKKSEKSVRDIEELLKEIKRELEEI

SEQ ID NO: 17634 - protein, 59 aa, Artificial Sequence
  Synthetic
ERVERKLEELKRRLEELEKESERELDRLRKENEDLVRRSEEELRRLRRELEEIVREARE

SEQ ID NO: 17635 - protein, 56 aa, Artificial Sequence
  Synthetic
SEAEKVLKEVEDIIREVEEENRRLIREIEEEIRRVKEEVERLLRKSEKDIKEVEES

SEQ ID NO: 17636 - protein, 56 aa, Artificial Sequence
  Synthetic
EKLLREIERRMRELEKTSRKLLKEIKKKAKELKEKAEEVLRRSRKRTEELVDRLRK

SEQ ID NO: 17637 - protein, 60 aa, Artificial Sequence
  Synthetic
DVEDLIRELRKRLDELRKESEELLRRSKRKHEKLLTDSRKLLRDIEREARKLLEDVKRKG

SEQ ID NO: 17638 - protein, 59 aa, Artificial Sequence
  Synthetic
REMIETLIRKAKEIIDRLREENRRAVRRSDETLRRLKEENDKVITDVKRKIKELRDEVK

SEQ ID NO: 17639 - protein, 60 aa, Artificial Sequence
  Synthetic
SIDEEITRLEEESRRDEEESKRLLEKSRDDHRRLLERSEKLLRELEKRARDLLEDVKRKG

SEQ ID NO: 17640 - protein, 59 aa, Artificial Sequence
  Synthetic
EEMVRRVIEKYERAVERSTEENRDAFRRSEETIRELAKENEDAIREVKEIIDKLREDVR

SEQ ID NO: 17641 - protein, 60 aa, Artificial Sequence
  Synthetic
DVEELIKELERRLRKLLEDSRRLLEESRREHKKLIDDSRRLLDELRRRLERLLEKVRRRG

SEQ ID NO: 17642 - protein, 59 aa, Artificial Sequence
  Synthetic
REVIEAVIRKAEDIIRRLRRKNEKAVEESRENIKEIKRENKRVIDEAREIIKRLEEELE

SEQ ID NO: 17643 - protein, 60 aa, Artificial Sequence
  Synthetic
SVEDLLRRLEEESRKDLDDSRRLLDESRKRHEDLLRKSEELLRELEERLRRLLEKVKKKG

SEQ ID NO: 17644 - protein, 59 aa, Artificial Sequence
  Synthetic
EDVIRKLIEDYERLVKESTDRNRRAVEKSRENLKRLDKENRDVIEKARRIIEELEKEVK

SEQ ID NO: 17645 - protein, 59 aa, Artificial Sequence
  Synthetic
SVDELIEELRRRLEKLLREAEELLKESRKRHEELKKRSKELLDELEREVERVLEELRRK

SEQ ID NO: 17646 - protein, 59 aa, Artificial Sequence
  Synthetic
EEVIERVIRKADEIIKRLKKELREVVERSKENIKKLEEENRRVIKKAREELRKIEEEIR

SEQ ID NO: 17647 - protein, 60 aa, Artificial Sequence
  Synthetic
SEVDEVLKTLKELIERLRERVKEVLKRLEKLLKELEDLSRETVRELRETNDDLRRKAEKT

SEQ ID NO: 17648 - protein, 56 aa, Artificial Sequence
  Synthetic
REAAEKVRRDVDRLRKEVEEMLERVKRKLDELRKDSDRLAREVEDSTRKIERDVEK

SEQ ID NO: 17649 - protein, 61 aa, Artificial Sequence
  Synthetic
SELEEMVKKVKEIIDRARERIRELIERHKELDRESRKRIEDIIREARELNKDVKRVIKEIK

SEQ ID NO: 17650 - protein, 56 aa, Artificial Sequence
  Synthetic
DEALEELKRRVKRLEEKLREDIKRLRENNERIREDVERLAEELDRHTRKLMEEVKK

SEQ ID NO: 17651 - protein, 60 aa, Artificial Sequence
  Synthetic
SELEDIVEKAKKIIEDVRRRIEKLIRDDKRLNDESKKTIEELIRKARKLNEEAERIIRKI

SEQ ID NO: 17652 - protein, 56 aa, Artificial Sequence
  Synthetic
RELLEKLRRDVEELEREVRELLERLKENSKRIEDEVRELMKELKRHTEELEREAER

SEQ ID NO: 17653 - protein, 60 aa, Artificial Sequence
  Synthetic
RELEEIVERAKEIIRRVAEKIKKLIEEAERLDRDSKRKIDELIEKVKKLNEDVRRTIEEI

SEQ ID NO: 17654 - protein, 56 aa, Artificial Sequence
  Synthetic
EEMLRRLTELLKELADEVKKLLDRLKENNEKIREDVERLLRELEEHTKKLEEDVTR

SEQ ID NO: 17655 - protein, 60 aa, Artificial Sequence
  Synthetic
SEEERVLKELEDVLREHKRKADESSRKLEEVHRRHRKRMEESKRELEEVHKEAKDRITKN

SEQ ID NO: 17656 - protein, 55 aa, Artificial Sequence
  Synthetic
EELEDVERKARELEERNKKLLKDSEEATEELRRENEEMLEESKRRTEKLEREVRT

SEQ ID NO: 17657 - protein, 57 aa, Artificial Sequence
  Synthetic
DKVREVLRESEKLLEDWDRELKEVLKDFKRTLDELEERLRDVLRKNKKSLEDLKRRG

SEQ ID NO: 17658 - protein, 55 aa, Artificial Sequence
  Synthetic
DRIMRELRELNRRLDESVKEIRDRLRRILDKLRKMIEKLKKELEDTDRELEERVR

SEQ ID NO: 17659 - protein, 57 aa, Artificial Sequence
  Synthetic
SKAEEVLKTSEKLLEEWRRRVKEVEDRNEETIKRLKEELDRALKENEESLRELEKRG

SEQ ID NO: 17660 - protein, 55 aa, Artificial Sequence
  Synthetic
DRISEELKKLNEELERELRKLSEELKEVDREAKEEIRRLVEELREIDKRLEEETK

SEQ ID NO: 17661 - protein, 57 aa, Artificial Sequence
  Synthetic
SEAEKVLTDFRDALEKDRERNERVLRENEETIRRDKEENERVLRENDKSLKELRKRG

SEQ ID NO: 17662 - protein, 55 aa, Artificial Sequence
  Synthetic
DRIKKTLERLLRESKKASEKLKDDLRKLDKRSKEESRRLTERLREIDEELRRRVD

SEQ ID NO: 17663 - protein, 57 aa, Artificial Sequence
  Synthetic
SEAEDVLRRFEEELRRDDEKNERVLRRNEETNRRDDETNRDVLRRNKESLDKLRKRG

SEQ ID NO: 17664 - protein, 55 aa, Artificial Sequence
  Synthetic
KRIKDELRKLLKRSEERSEELRRRLEDLDRRSKETSDKLREELERLDRDVERKVN

SEQ ID NO: 17665 - protein, 57 aa, Artificial Sequence
  Synthetic
SEAEKVEDDVRRVLETDEKKNRDVLDTNRRTIEEDRKRNEEVLRKARKMLEDLKRRG

SEQ ID NO: 17666 - protein, 55 aa, Artificial Sequence
  Synthetic
ERLRETLEELLRRSDERSRRIMEDLKRLDTDSKRVSEELKRRLEELLKDLERKVR

SEQ ID NO: 17667 - protein, 59 aa, Artificial Sequence
  Synthetic
SEVDEITKELEESLKDLDRVVRELREKIKKIDKELAETVDKLTEEAKEILKTLRDIIRR

SEQ ID NO: 17668 - protein, 62 aa, Artificial Sequence
  Synthetic
KKLKEKVDRVHKRHKDRLDEIKRKLKKVLEDNRETLERIKRKLRKVLEDLKRMLDELERELR

SEQ ID NO: 17669 - protein, 60 aa, Artificial Sequence
  Synthetic
KETEDLVRRLRKVLKELEERVRTLMRDNERVNKEIADKIRRLREKLREEDERVDEVVKRR

SEQ ID NO: 17670 - protein, 55 aa, Artificial Sequence
  Synthetic
REVLREMDERVKELEERLERVLRKSKTDADRWRRELKRVLEEHDKTVKEIREKTR

SEQ ID NO: 17671 - protein, 61 aa, Artificial Sequence
  Synthetic
KEKDEVVKRYEDRIKEIRERLKEVVTEHEDRLRKWRKDLEEVVERNRRSIKKIDEEVKRRG

SEQ ID NO: 17672 - protein, 55 aa, Artificial Sequence
  Synthetic
EDVVRKLDEDLKRNEDHLEEVRKELERLNEEIEKLIRDLLEILRRIDKELRDKLE

SEQ ID NO: 17673 - protein, 61 aa, Artificial Sequence
  Synthetic
DEEKDVTRRVREVIKRLEEELEEVVRRHRESLKRLKERLEEVVRRNRKSIREIEKEVKDAG

SEQ ID NO: 17674 - protein, 55 aa, Artificial Sequence
  Synthetic
EDVDRELARMLEELRDLLRRLAEELKRIDEELEKELRDVARELEKIDRDMREELR

SEQ ID NO: 17675 - protein, 61 aa, Artificial Sequence
  Synthetic
DERKEVEERYRREIERIKTKLKEVVKRHEDSLKKIEDDLEEVRRDNERSIKEIREEVRKKG

SEQ ID NO: 17676 - protein, 55 aa, Artificial Sequence
  Synthetic
EDVDRELKEDLERNERHLEEVTRRLRKIDKDLKEKLKRLEEELKKIDREARERLR

SEQ ID NO: 17677 - protein, 60 aa, Artificial Sequence
  Synthetic
KEIEDVKRRLEELDRRIKELVDRVRRKLEEVDTRAEKELRDVRRRLEELLERLEELIRRG

SEQ ID NO: 17678 - protein, 58 aa, Artificial Sequence
  Synthetic
KELRDVIKENEDTLRRLKEEVEKVTKENEETLRRIERELDKVERDVERRIRELEEERR

SEQ ID NO: 17679 - protein, 57 aa, Artificial Sequence
  Synthetic
SEVEKVLEDNKRSIDRLEEELRKVTRTSRELLKEWAKRLEDVLRDVKRAVDELETRG

SEQ ID NO: 17680 - protein, 59 aa, Artificial Sequence
  Synthetic
SDEIRKLKEELKRLDEEAARILETIMRRNKDLNDRLREIIETLKKRLKDLLKEVEDRAR

SEQ ID NO: 17681 - protein, 60 aa, Artificial Sequence
  Synthetic
DAEKLREDVERTLRRLRKELKDSIKRNREELERLERKLRKSIKETEDEVRKLEEKLERRL

SEQ ID NO: 17682 - protein, 55 aa, Artificial Sequence
  Synthetic
DDVRRLVEKIEREVRKLIEDHKKKSEDIVRTVEKLIEDHKRRVDRISEEVEEELR

SEQ ID NO: 17683 - protein, 61 aa, Artificial Sequence
  Synthetic
SKEDLKRKVKKILEDVERELRRSIEDTERLLREVEKRLEDSVRENRRKLREVEEKLRRRLK

SEQ ID NO: 17684 - protein, 55 aa, Artificial Sequence
  Synthetic
RRVDELVKEIEERARKLIKEHRDRVRELLRELEELIERHKELSERILKELEELLK

SEQ ID NO: 17685 - protein, 58 aa, Artificial Sequence
  Synthetic
SEKEEIARRLEKVHREHREELKRLEDRLREVLKRNRETIEDIRRKLEEVLRRLRERLV

SEQ ID NO: 17686 - protein, 56 aa, Artificial Sequence
  Synthetic
EEKLRRDVERIVKEAEDTLRELERVVRELEKEVRETDKRLDERVKELEEKVRRAAK

SEQ ID NO: 17687 - protein, 59 aa, Artificial Sequence
  Synthetic
SEEEDARRLLEEVERALREIKKRLKELLERHRRAVEELKKRAEDLLDEHRRAIERIADE

SEQ ID NO: 17688 - protein, 55 aa, Artificial Sequence
  Synthetic
EEIKRRLKELAKDLRRAIKEVKERLKESHDELKRAIEDVKRKLEELDEKLKRDED

SEQ ID NO: 17689 - protein, 57 aa, Artificial Sequence
  Synthetic
SERERVERSVEELIRRYREVLEESERRNRKLLKRYEDALKKSREDNKRLLDELRRAN

SEQ ID NO: 17690 - protein, 56 aa, Artificial Sequence
  Synthetic
REDAERLLERIERHLRRSEKTSEELNRRLEDHARRSIEESKKLNEELERKLRELER

SEQ ID NO: 17691 - protein, 57 aa, Artificial Sequence
  Synthetic
SSEETLRDINRKISKAIEEIEREAREIDRELRKAVEDLKREAEEIDERVREVIERIG

SEQ ID NO: 17692 - protein, 62 aa, Artificial Sequence
  Synthetic
TEVKKVLDKNEELLKRWEDRLREVLERNRKTLREIERELEEVLRKNRESIKKLKRELEEASR

SEQ ID NO: 17693 - protein, 57 aa, Artificial Sequence
  Synthetic
SSEEDLKRIDDELDKMVKDIERKIRRIDTELERVVKELKEDIERSLERLREVVERIG

SEQ ID NO: 17694 - protein, 62 aa, Artificial Sequence
  Synthetic
RDVRRVLDENRKTLEDLKRKLKEVLDRNRETLKRIEKELREVHEKHNRALDELRKELEDRRR

SEQ ID NO: 17695 - protein, 57 aa, Artificial Sequence
  Synthetic
SVEEEAEDILRRLDKTVRDLEREAEKIDEDLERVVRKLEEELRRSLEELRKVVEEIG

SEQ ID NO: 17696 - protein, 62 aa, Artificial Sequence
  Synthetic
RDVTRVLRKAERVLKEIEEKLRDVLRRNRETLKRIEDELERVHRDHNRKLKRLKEELDERRR

SEQ ID NO: 17697 - protein, 56 aa, Artificial Sequence
  Synthetic
DEDRDVEEKIKKIIKAAEDVNKESEERITELKKRLREIHERSERLIRRIEEEAKKK

SEQ ID NO: 17698 - protein, 56 aa, Artificial Sequence
  Synthetic
KKKLDEIIERLRKLLEDLEERNRRVIKELEDLIKENEELNRKVIRDLEKLVEDAER

SEQ ID NO: 17699 - protein, 55 aa, Artificial Sequence
  Synthetic
DEEDEVRKRVEESERESRKLLTDVKREADRLKEHDKRLLDEVKKLLDKIREDLKK

SEQ ID NO: 17700 - protein, 60 aa, Artificial Sequence
  Synthetic
REELKRELDRIIEELKELNKRLEERLRELIRDWERVSRELAERLKRIIDKARRLLEEVAR

SEQ ID NO: 17701 - protein, 57 aa, Artificial Sequence
  Synthetic
DEVEELLKELKDLSRESVRELRRLDEELKDLSRRSLKRLTDLDEELRREVEERRKEN

SEQ ID NO: 17702 - protein, 55 aa, Artificial Sequence
  Synthetic
ERLKKLADDSRKRLRDVERHHEKLVEDSERRLKTIKDHHKKAVEDIRRDLRETKR

SEQ ID NO: 17703 - protein, 56 aa, Artificial Sequence
  Synthetic
SEIDEVLKEIKRIIDELRERNRKHNEEVKDRIRRLEEELRKDLKDLKEIVERLAKS

SEQ ID NO: 17704 - protein, 58 aa, Artificial Sequence
  Synthetic
EAADRARELEKELKDISDTSRKSNEELRKRLEEIKDRVRKEIEKLLRELEEIVKEKRR

SEQ ID NO: 17705 - protein, 60 aa, Artificial Sequence
  Synthetic
DEEKETIKRHRESVREAERRLRDTLRRNRELVERLKRTLEDILRKHEKLVEELEEMAKRG

SEQ ID NO: 17706 - protein, 55 aa, Artificial Sequence
  Synthetic
EELKESHKDLKKIHEDAERRVRESHTDLRRIIEKVKEDLERSHRKLKRIADETRK

SEQ ID NO: 17707 - protein, 57 aa, Artificial Sequence
  Synthetic
SEMEEVLERDERKVRELEREIEKNLRDHKDEVRRLREDLERVLREDEKLVRELRKKN

SEQ ID NO: 17708 - protein, 59 aa, Artificial Sequence
  Synthetic
EELEDRMRRSSKRLEEVLRESEERLKRSDEDLRRVIDEIRRRLEESTRRLEETIKELKD

SEQ ID NO: 17709 - protein, 60 aa, Artificial Sequence
  Synthetic
SEREEVLKDIRRLLDEVRRRIEDLLEKLRRLNEEVKEKVKESEKRLRDLMRKAKELMKRG

SEQ ID NO: 17710 - protein, 55 aa, Artificial Sequence
  Synthetic
EDIKRLIEELEKLLKEAKEKAEDLTREHDDTLKKIRERHKEIIKDIEDKLDTDRQ

SEQ ID NO: 17711 - protein, 60 aa, Artificial Sequence
  Synthetic
DEEEELKKKLKAILEDLKREMREHEEKLRRSLERVARTAERHKETIKRIIDRLRKEAEDV

SEQ ID NO: 17712 - protein, 55 aa, Artificial Sequence
  Synthetic
EEVKRIAEDIKRVLEEIRKRSREILEEVKRLHKKIKDDSRKLLKDLEKLVREIRK

SEQ ID NO: 17713 - protein, 56 aa, Artificial Sequence
  Synthetic
SVEDEARRLEEKLRELTKRAREALEESNRRHRKSVEEVRRSLKKNHEKLEELARRV

SEQ ID NO: 17714 - protein, 55 aa, Artificial Sequence
  Synthetic
ERLLKELEDLIEEVERELRRVLTESKRLNEELRKRVKEIEERSEELIERLDREVR

SEQ ID NO: 17715 - protein, 56 aa, Artificial Sequence
  Synthetic
SMDESMETLTRELEDLLRKVEKKLRDSNEHHRELLEEVKRRVEENHKELDELLRRA

SEQ ID NO: 17716 - protein, 55 aa, Artificial Sequence
  Synthetic
EELLTKIRKLIRDVEETVREAERESRALDERLERTVRDVEEKSKRLIEELRRRAD

SEQ ID NO: 17717 - protein, 56 aa, Artificial Sequence
  Synthetic
DAEEEIRRIDKHHEENVRKAEEDIRRLIEHHKENVERVDRELRKIIREVEEVIRRV

SEQ ID NO: 17718 - protein, 59 aa, Artificial Sequence
  Synthetic
ERLVRELIRRLERTDEEHHKKVRRILEELKRIDEEHHRLVRRILKALKDIIKRLREEVK

SEQ ID NO: 17719 - protein, 56 aa, Artificial Sequence
  Synthetic
SLEEEIEKIERHHRKLVEEARRELKRLEDKLEKLNRDSRKRLKELAERLKKLIDEI

SEQ ID NO: 17720 - protein, 59 aa, Artificial Sequence
  Synthetic
ERVARRVLDELRRLNEKLRRMVEELVKEIERLIKKVKDDSEDVMRKLKELLKRLEDRAR

SEQ ID NO: 17721 - protein, 59 aa, Artificial Sequence
  Synthetic
REKEELLERLKKVLERTERVIRDLERRLREVLERSRKLAEDLVERLERSLKTLEKLARE

SEQ ID NO: 17722 - protein, 55 aa, Artificial Sequence
  Synthetic
EELREIYKRHEDLLRTAEERLRKVYDDHRDLLRKIDEDLKRLKERHEELLREIRR

SEQ ID NO: 17723 - protein, 60 aa, Artificial Sequence
  Synthetic
EEKDRLKKRLEELNREHEELVRRISERVRRLLEKAEREIRTLKKRLDELNKELEEIIRRD

SEQ ID NO: 17724 - protein, 59 aa, Artificial Sequence
  Synthetic
EKVKKELEDVERHSRDSSRRVKEELERLKEELDRRLRKVKEDLERVKRHSKKLVDDAKR

SEQ ID NO: 17725 - protein, 61 aa, Artificial Sequence
  Synthetic
SEREDLRRELEELLREHEEVVKEVKRRLEELLREHEEIVRELTERLKTINEDLKRVIKRDK

SEQ ID NO: 17726 - protein, 59 aa, Artificial Sequence
  Synthetic
EEAEKELRDVAKRLRESSREVRETVRDVADKLRESSKKLEEELRRVKKHSKKLLDEAKK

SEQ ID NO: 17727 - protein, 59 aa, Artificial Sequence
  Synthetic
SLEDLLRKVEEDAKRSIEKLEKDLKRVEDKHRELVERVKRRLDDVRRKLEEIIRDAERK

SEQ ID NO: 17728 - protein, 59 aa, Artificial Sequence
  Synthetic
ERVVREVLDELRKLLDDHNKKVKTVLDELKRSLDKLREEVKKVEDKLEEILKTLKETVR

SEQ ID NO: 17729 - protein, 55 aa, Artificial Sequence
  Synthetic
SLEELIREIEKELDDLLREHEDLLRKIKEEIERLIREARELIKRLEEENEELRRN

SEQ ID NO: 17730 - protein, 59 aa, Artificial Sequence
  Synthetic
EEEVKREIDRVRRVIEELRESVERLREEVRETLRRLKEHVKKDVEDHKETVKEVERRTR

SEQ ID NO: 17731 - protein, 56 aa, Artificial Sequence
  Synthetic
DTEDLIREIRRRLEESVRENKELLDRLRERLEESIKRNEDLLKRHRENSKRIADRV

SEQ ID NO: 17732 - protein, 58 aa, Artificial Sequence
  Synthetic
ELVKEMIDRLRDLLRRHKEESKRLVEEVKKLLDRHREESERLVRELDKMNKDLEDRAR

SEQ ID NO: 17733 - protein, 55 aa, Artificial Sequence
  Synthetic
DTKELLDELRKRLEDSARRVEELEKRVKDELERLKKRSEELLDEIRKRMKDVRDR

SEQ ID NO: 17734 - protein, 56 aa, Artificial Sequence
  Synthetic
KDELVRRLDETLKDHDRKLKELVDEAKELLRRYEEESKRLKRELDEILRRVREEAK

SEQ ID NO: 17735 - protein, 60 aa, Artificial Sequence
  Synthetic
REIEEVRKKVEKILRDYDKVVKDIVEKVRRILEEYRRKSEKLTREIEEILRRLREVIKRD

SEQ ID NO: 17736 - protein, 56 aa, Artificial Sequence
  Synthetic
EDSLREIRKEARRLHEKSKKLLDEIRKRAEDLERETKKLLDDIKRELEDVVRELEK

SEQ ID NO: 17737 - protein, 56 aa, Artificial Sequence
  Synthetic
RELEELLKRAEEVIKELKKSIDTMKEENDRLITELAKRVEDLKKRNDDVLERLKKD

SEQ ID NO: 17738 - protein, 56 aa, Artificial Sequence
  Synthetic
EEVLKEIDKRLKELEKEHEKVNRESEKRLEELLRRVEKVNRDSERELERLREERET

SEQ ID NO: 17739 - protein, 57 aa, Artificial Sequence
  Synthetic
SEIEEVLERAERLLRRVAEALRRTTKELEDLNREVADLLRRTTEKAERLIRRVKSKI

SEQ ID NO: 17740 - protein, 56 aa, Artificial Sequence
  Synthetic
VEELKRVADEVVKKADDLVDEDRKLAKDSVDELRRLVEKDEKLAKDVVEEVEKLAE

SEQ ID NO: 17741 - protein, 60 aa, Artificial Sequence
  Synthetic
SLEDAVRKARELIKRAEDILRRAVEEAKKLHKRSKEILEKAVEDAKRLYEEAKDAARKAG

SEQ ID NO: 17742 - protein, 56 aa, Artificial Sequence
  Synthetic
AKTILDKAREVAERVARLARKLLEDSRKVARESAELAKRLLEYAKKSAEDAKRKAK

SEQ ID NO: 17743 - protein, 60 aa, Artificial Sequence
  Synthetic
SIDEVLKELEDVARKSKEKNKRVHDDDERVVREVHKENRRVLRELEEMAERVRRELEKRG

SEQ ID NO: 17744 - protein, 60 aa, Artificial Sequence
  Synthetic
EEKVVRRVKDIARHNLELADRSVEESRKSVKENKDLVDRSVKKVEDLVRELKRLVDEIKR

SEQ ID NO: 17745 - protein, 60 aa, Artificial Sequence
  Synthetic
SIDEALTRLERAVEESHKRNEDVHRRDEEAVREVHKRNREVVKKLEDEVRKVIERLRRRG

SEQ ID NO: 17746 - protein, 60 aa, Artificial Sequence
  Synthetic
EEEVVRRIDELVEHNKDLVRRSVDESDKSVETNKDLVEKSVRRVDKLVKDLRRLVDEIER

SEQ ID NO: 17747 - protein, 60 aa, Artificial Sequence
  Synthetic
KIDEALKRLREVVKRSHEENEEVHKEDEKVVRELDKENKDVLKELDEAVKRVEKKLRDRG

SEQ ID NO: 17748 - protein, 60 aa, Artificial Sequence
  Synthetic
EDEVVKRIDELVTHNKRLVEESVERSKESVDRNRRLAEKSVEDVRRLVEELKKLVDDITR

SEQ ID NO: 17749 - protein, 59 aa, Artificial Sequence
  Synthetic
SLEEVLRRLEKVVRDSDKRLEEVLTRLAKVVRESNKRDEDVHKELRDVVRRVEELLERS

SEQ ID NO: 17750 - protein, 56 aa, Artificial Sequence
  Synthetic
EETVDKLVEDNERLVREIVKEVDELVKRNEDRARESVDESRKLVRRIEERVREETR

SEQ ID NO: 17751 - protein, 56 aa, Artificial Sequence
  Synthetic
SVEDVLREAKRVLDEVRERLREVNTETNKVIKDVKKESDDVNRETNELIERVAREV

SEQ ID NO: 17752 - protein, 55 aa, Artificial Sequence
  Synthetic
EEVERLVDEVRKLVKRLVEHVKKLAKEIKELLERNVRHVEEVAERIKRLIKETKD

SEQ ID NO: 17753 - protein, 60 aa, Artificial Sequence
  Synthetic
ELREDVERVVDEIRRLVEENVRRIDEVAKDIKRLADDNVRRVKELVRKIEEDIRRLKEEG

SEQ ID NO: 17754 - protein, 56 aa, Artificial Sequence
  Synthetic
ERVLKKLKEVIEDVERKSRDALRRLEEAIRRVRRESERVNRELDEVIKRVTEELKK

SEQ ID NO: 17755 - protein, 58 aa, Artificial Sequence
  Synthetic
SAREKVEKVVKEVEELVKRDVEEVERIVEEVKKLVTEDLKISEEIVERVDRLIRELKK

SEQ ID NO: 17756 - protein, 56 aa, Artificial Sequence
  Synthetic
ERVLKKLEDVVRRVEKESEDALRRLKEVIKKVKRESEEANRKLEEVIRRVVERVRR

SEQ ID NO: 17757 - protein, 59 aa, Artificial Sequence
  Synthetic
SRSEKLVDEARKMVERSKEIVDKSEREVEDVVRRARRNVEKVLKDAKKVVDEVDELTKR

SEQ ID NO: 17758 - protein, 55 aa, Artificial Sequence
  Synthetic
EDVLREVEELVRRVEEENDRVLKRAKELVEDVKRKHDRVLETVRKLVEDVTRRLK

SEQ ID NO: 17759 - protein, 57 aa, Artificial Sequence
  Synthetic
DEVDKVKEELERVIKEVDERNKRSSERLEEVNRKIRKEIKEVVERLKELIERVLRKV

SEQ ID NO: 17760 - protein, 56 aa, Artificial Sequence
  Synthetic
VDEIRRLVEEVLRRARKLVEEDKELIKKSLKDLKTIVDELRKLLEDVIREAERTAR

SEQ ID NO: 17761 - protein, 55 aa, Artificial Sequence
  Synthetic
EEVERILEDVRRMIEDHRRKVEEIVKRSEDMARRLIEEVKRIVEESKKLADELKK

SEQ ID NO: 17762 - protein, 55 aa, Artificial Sequence
  Synthetic
EDVRRELKRLVDEVKKRNDEVRERDKEVVDRVKEVLDRVRETDRRLVEEVRRRAN

SEQ ID NO: 17763 - protein, 55 aa, Artificial Sequence
  Synthetic
SRVEKILEDVKEEIKKHKEEVDRIVKRSREMAKRHIERVDEILERSRRMIEELKK

SEQ ID NO: 17764 - protein, 55 aa, Artificial Sequence
  Synthetic
EDVERELRRLVEEVEKRNEDVEREDRRLVEEVKKRNDEVRKEDRRLVEEVKERAR

SEQ ID NO: 17765 - protein, 61 aa, Artificial Sequence
  Synthetic
DELEKVEKDVRRLLEKVRKRIDEVRKEVERLSRESEEVTRRVLETVEKLLKDVERVIRETL

SEQ ID NO: 17766 - protein, 56 aa, Artificial Sequence
  Synthetic
VEEVLETVKRLIERIEEEIEKVVKDVERLVRESIKHSRDVLKEVDDLIKRIRERVK

SEQ ID NO: 17767 - protein, 56 aa, Artificial Sequence
  Synthetic
DDDKRIREILRRVHEKSEKVLRKVRKRLEEVRRESEEVVRRVKKDLDRVLEEVRRK

SEQ ID NO: 17768 - protein, 55 aa, Artificial Sequence
  Synthetic
EDVAREVEEIAKRTIDRVEAIVREVERIARESIDNVRRVVEEVKRAVTELIKRVE

SEQ ID NO: 17769 - protein, 56 aa, Artificial Sequence
  Synthetic
SEDETIRRIVRTVHEESRKSTEDVRREVERVLRESEEVVKKVKKKVDDVLKRVEET

SEQ ID NO: 17770 - protein, 55 aa, Artificial Sequence
  Synthetic
EEVAREVTKIARDTIRENEEIAKEVREIVERSIKNLEEVAEEVERVVRELIEARR

SEQ ID NO: 17771 - protein, 56 aa, Artificial Sequence
  Synthetic
SRDEKIRDILRRVLKEVRDSTKKVEEDLEDVHRRTEEELRKVKKRLDEVLKRVRDE

SEQ ID NO: 17772 - protein, 55 aa, Artificial Sequence
  Synthetic
EKVAEEVKRIADRLIDLNRRIAEEVDKIVRDSIKKVEEIVTEVEKIVEKLIRDVR

SEQ ID NO: 17773 - protein, 55 aa, Artificial Sequence
  Synthetic
DRLEKIVEEVRRLADELIRHVERNVREVEKAVRESIEHVRDVAEKVERAVRELEK

SEQ ID NO: 17774 - protein, 55 aa, Artificial Sequence
  Synthetic
EEVRKELKRVIREVEKVNKESNDVTRKVKEESEKVLKEVEKRLREVIRRVKEKIR

SEQ ID NO: 17775 - protein, 55 aa, Artificial Sequence
  Synthetic
SEVEDVVRKVEKLVRDLIKHVEENVRRVEEVVRKLIEEIKRIAEEITRIAEELAK

SEQ ID NO: 17776 - protein, 55 aa, Artificial Sequence
  Synthetic
EEVEKVLREVVKEVEKVNRESREVTRRVLEEAKEMLERVKKIVKEVIEKVRRVVK

SEQ ID NO: 17777 - protein, 60 aa, Artificial Sequence
  Synthetic
SADREVEERLREVIERVKEALKRSKDVTDEVTRRVEKLDKESNDTSREVIRRVEDMLSRV

SEQ ID NO: 17778 - protein, 59 aa, Artificial Sequence
  Synthetic
DELVKRIVEKVDKAVKDLEKLVRENVERVRRAVERSRKTVEDNVKRSRDVVRELRERVR

SEQ ID NO: 17779 - protein, 60 aa, Artificial Sequence
  Synthetic
SSIDEVREEIRRVIEEVRKLLEESKKDTDRVRREAEDMDRKANETVEEVERRVREVLRSV

SEQ ID NO: 17780 - protein, 59 aa, Artificial Sequence
  Synthetic
EEVVRRILKRIEEVLKKLRKAIKDNVDRVRDAVRRSRRTVEDIVRRVREVLERLEREIK

SEQ ID NO: 17781 - protein, 56 aa, Artificial Sequence
  Synthetic
SLAEEVERRLEESHKRARKLVKEVKEALEESHKESDRLVREVEKELKRVAEEVRKE

SEQ ID NO: 17782 - protein, 56 aa, Artificial Sequence
  Synthetic
VEKVRDLVRKTTEKVEEVVRRLRELVKENLDEAKRVVEDLKRKVKEIEEKVKEDSK

SEQ ID NO: 17783 - protein, 56 aa, Artificial Sequence
  Synthetic
SMAEKVDEVSKRSKEELKRVVKEVHEVSTRVEKVVKDVLREVEKVSKESTDVVDRV

SEQ ID NO: 17784 - protein, 59 aa, Artificial Sequence
  Synthetic
REVVDKVVRDLEKTVKDVKEVVDRAVTASKELVDRIRRLAEEVVRALERTVDKVRRDAK

SEQ ID NO: 17785 - protein, 56 aa, Artificial Sequence
  Synthetic
DAREEVDEVSRESKEELKRVLDEVDDVSEKSRKTVRDMLRKNKEVVDEVEKTLEDV

SEQ ID NO: 17786 - protein, 59 aa, Artificial Sequence
  Synthetic
KEVVKDVVRKLRETVKRVREVAEEVVRELEKTVDEVRKRADDSVKKHRDLVKEVKEAAD

SEQ ID NO: 17787 - protein, 56 aa, Artificial Sequence
  Synthetic
SAEEDVERVVREVEREVREALRRVREVSERSREDVRRVVDENRKVAEEVEKRVRDV

SEQ ID NO: 17788 - protein, 59 aa, Artificial Sequence
  Synthetic
EEVVREVVKKLREIVKDIRRLAEEVVRRLEDTVRKVREIAKRSVDAHRELVRRVEERAR

SEQ ID NO: 17789 - protein, 56 aa, Artificial Sequence
  Synthetic
SSAEEVERVLRRVEEEDRRLVAEVRRVLKESRRTLEELVRRVKEVLEEVRKEVERI

SEQ ID NO: 17790 - protein, 56 aa, Artificial Sequence
  Synthetic
AKELIKRVEEIVEESRKLIDEAIREVEENVDRSRKKIKELIDRVREILKRARDRAR

SEQ ID NO: 17791 - protein, 56 aa, Artificial Sequence
  Synthetic
DSEEEVKKVLDEVRRRDEKLVEEVRKVNEDSLDTLRKLAEEVKRKLDEVRERVERL

SEQ ID NO: 17792 - protein, 56 aa, Artificial Sequence
  Synthetic
AEELIREVERIVKKSEDMIREHIRKVEENVEESKKEIEELIRRVDDILREAKEAAD

SEQ ID NO: 17793 - protein, 56 aa, Artificial Sequence
  Synthetic
SGEEDLERVLDEVRRRDKKLVEEVRKRNEDSLRRLERLAEEVERVNEDVLKKVEEL

SEQ ID NO: 17794 - protein, 56 aa, Artificial Sequence
  Synthetic
ASEVRKLVEEIVTDSRRRITEHIRRVEENAKDSERVIREHKERVKEILEKVRRAAE

SEQ ID NO: 17795 - protein, 59 aa, Artificial Sequence
  Synthetic
SEVEKLVEDVKKAVKEVLEEAKENVRKVEDVVRRVLERAEDNVEEVKKVVATLVDLVRR

SEQ ID NO: 17796 - protein, 59 aa, Artificial Sequence
  Synthetic
EELMREVRRVIKEVRDRVRDVLDEVRRVNEEVNRRVRKVLEDVRRVNERTKEDLDRESK

SEQ ID NO: 17797 - protein, 59 aa, Artificial Sequence
  Synthetic
SEVDKLVREVDELVKKSKDNIDKLVKRVREMVEESKRKADRNVEEVERVVREIKDLARR

SEQ ID NO: 17798 - protein, 59 aa, Artificial Sequence
  Synthetic
DELVKKVRDRLEEVERRTRKALEDVKRVLEDVKRLTDTALREVERVNRKTEEEVDREIR

SEQ ID NO: 17799 - protein, 59 aa, Artificial Sequence
  Synthetic
DKVDRVVKEIEEAVKENLDRVREIVKEVRDLVRENLEEVRKSVEDVKRLVKEILELVRA

SEQ ID NO: 17800 - protein, 59 aa, Artificial Sequence
  Synthetic
EDAVRKVEEVLREVEKRSTEALKELRDVLREVRRESEEALDENRRVTEEVKKKVEDERK

SEQ ID NO: 17801 - protein, 59 aa, Artificial Sequence
  Synthetic
SEVEEIVREIRDLVRKNEERVKKIVEDVRRAVEEILELAERSVEKVKRLVDDLRRLAEN

SEQ ID NO: 17802 - protein, 59 aa, Artificial Sequence
  Synthetic
EEAVRKVDRVLEEVEKRSRDALKELEEVLKEVERLAREVLEKNERVTEAVEDLVTKAAK

SEQ ID NO: 17803 - protein, 59 aa, Artificial Sequence
  Synthetic
DEEERVREELERVNEEVKELKKEVETVNKRVHETLEKVIREVKKVNDDVHRTVEDLRRR

SEQ ID NO: 17804 - protein, 56 aa, Artificial Sequence
  Synthetic
VEEIVKKIKEVVDRTRKLAKELVKESRDLAEDVKRLIKRLVEDSRRLVEEIKERAR

SEQ ID NO: 17805 - protein, 60 aa, Artificial Sequence
  Synthetic
SEEERVEKRLREVNKDVKRLVKKVRDVNRKVHEDTKRLVEEVRRVNRDVHRRVKELREAG

SEQ ID NO: 17806 - protein, 56 aa, Artificial Sequence
  Synthetic
VDKIVEEIDKVVTETRELAERLVKESEDNVERSRDLARKLVEKSERLVKEIDDRAR

SEQ ID NO: 17807 - protein, 59 aa, Artificial Sequence
  Synthetic
SAAEKVREELERVNRRVEELLKKVKKVNEEVRDIVRKVVREVERVNKEVEEEVKRLVDQ

SEQ ID NO: 17808 - protein, 56 aa, Artificial Sequence
  Synthetic
VEEIVKKIKDVVKRTDELAERLVETSERLARTIKKVAEDLVRDSKRIVDEVRTRIT

SEQ ID NO: 17809 - protein, 59 aa, Artificial Sequence
  Synthetic
SDEDRVRRRLEEVNREVEELLRDVERVNEEVKRRVKKVIREVEEVNKRVEEEVKRLRDE

SEQ ID NO: 17810 - protein, 56 aa, Artificial Sequence
  Synthetic
VEDIVRKIDDVVRETRELAKELVKHVRDVVEDVRRLVKELVDLSEKLVKEIRDKVE

SEQ ID NO: 17811 - protein, 59 aa, Artificial Sequence
  Synthetic
SEVEKVVKEMEDLARENERLAREIVKDVERLVREIEDTVRRSVETTRRLVEEIRELAER

SEQ ID NO: 17812 - protein, 59 aa, Artificial Sequence
  Synthetic
ERVLELLERVLRELEKVVEDSKRRIKEVLDELRKAVDKVKKEDKKVHDELRKVVEEVRT

SEQ ID NO: 17813 - protein, 60 aa, Artificial Sequence
  Synthetic
RVEELLRKVITELDRVLEEVRRRNEASIEELDRVLKEVERLNKEVDEELKKVLEKVRKDV

SEQ ID NO: 17814 - protein, 59 aa, Artificial Sequence
  Synthetic
EEVVRRIVEEIKKVIDELREESRRTVREVEKLVKEILDRSRKTVEEVKRLAEEIERKAK

SEQ ID NO: 17815 - protein, 60 aa, Artificial Sequence
  Synthetic
RVKELVDEVKRKVEESMRESTERNRTATEKVEKSLRDSEKLNRDATRKLKKVVDDVRREG

SEQ ID NO: 17816 - protein, 55 aa, Artificial Sequence
  Synthetic
EEVVKKVEDVVERNKDLVRKSVEHIDKVVKENRELVKRSVEHIDRVVKEARERAR

SEQ ID NO: 17817 - protein, 60 aa, Artificial Sequence
  Synthetic
SAEELVKRVLDDVRRSAEESERLNREATEEVKRSLEKSRKDAERVLRDLERVVRKVKTEG

SEQ ID NO: 17818 - protein, 55 aa, Artificial Sequence
  Synthetic
ERVVRKVEAVVERNRKLVEDSVRHIREVVKRNEDLVRRLVEEVKRVVKKAEDKAR

SEQ ID NO: 17819 - protein, 60 aa, Artificial Sequence
  Synthetic
DVEELVKKVEDMVRKVIEEVKKRNTDVTRRVEESLRKSTELVREAEERLRRTLEELRRRG

SEQ ID NO: 17820 - protein, 55 aa, Artificial Sequence
  Synthetic
EEVVRKAEEVVKRAKELVARSVKHVDEVVRRNEELVTRLVRELDELVKEVRETAR

SEQ ID NO: 17821 - protein, 60 aa, Artificial Sequence
  Synthetic
RAERLVREVARRLEEVLKEVEKLNKDATDKVKKSLEDSRKKNEDVTREVRRVIEELRTRG

SEQ ID NO: 17822 - protein, 55 aa, Artificial Sequence
  Synthetic
EDVVRRAEELVERLRKIAEDSVRHLEEVVRKNERLVKESVDHVRTAVEELKETAR

SEQ ID NO: 17823 - protein, 59 aa, Artificial Sequence
  Synthetic
DAEEKVKEVEREVEKVIEEVKRDNTRVTEENKRVLDTVRERNKRVTDELRKVLEDVRRE

SEQ ID NO: 17824 - protein, 55 aa, Artificial Sequence
  Synthetic
EEVVKRIADVVKTVKRRVDESVKDIKRSVKETEDRVDRSVRHVEEVLKELRKASE

SEQ ID NO: 17825 - protein, 60 aa, Artificial Sequence
  Synthetic
SAEDKVRKVKKEVEKVIKDVKEENRRVTRENEEVLDRVKKDNERATRKLRKVVEDVRREG

SEQ ID NO: 17826 - protein, 55 aa, Artificial Sequence
  Synthetic
ERVVERIKRVVERVDELVRRSVKDVKDSVRETRKLVDDSVKDIDRVVKEARDRAK

SEQ ID NO: 17827 - protein, 59 aa, Artificial Sequence
  Synthetic
DAKDKVRKVLEEVKKVIEEVERRNRTVTRENERVLKEVKDRNTEVTKELKKVVEDVKRR

SEQ ID NO: 17828 - protein, 55 aa, Artificial Sequence
  Synthetic
EEVVDRVRRVVEEVTELVRRSVEEIKESVKTTRDLVRKSVKNIRDLVEEAKRRAD

SEQ ID NO: 17829 - protein, 59 aa, Artificial Sequence
  Synthetic
DEVETVVRDVKRLVRENERKVREIVKTVDKLVKENEDLVKRSVEELKKLAKEIKDLADE

SEQ ID NO: 17830 - protein, 55 aa, Artificial Sequence
  Synthetic
EDLRRVKKEAEDVVRDSERLIEEVKRRVKKVVDDSRRKDEEALRDVERVIEEVRR

SEQ ID NO: 17831 - protein, 60 aa, Artificial Sequence
  Synthetic
SEVDDVVRRVKKLVKEDRDLVRDSVRKLDELVRDDKRLVDEVVERLERIVKEIEDLMREG

SEQ ID NO: 17832 - protein, 55 aa, Artificial Sequence
  Synthetic
EKLEEVLKMLEKVSDEVKKENDRALKKVEDVSREVKELNKEVLKRARDVVERVRT

SEQ ID NO: 17833 - protein, 59 aa, Artificial Sequence
  Synthetic
SSKEKVKKVLDKVKEVLDRVRELVKRVDRESEKVVEDVRRKNKRASEKVKTVIRDVEEK

SEQ ID NO: 17834 - protein, 56 aa, Artificial Sequence
  Synthetic
VDDVLRKVEEIVRKVKDMVRKILEKAERNVEETERVVTESKENADRIVKEVEDRAR

SEQ ID NO: 17835 - protein, 60 aa, Artificial Sequence
  Synthetic
SAREAVTEVLRKVREVLKRVEDENRKVSKELRDLLEEVERRNRDLTEKVKRLIDELKERG

SEQ ID NO: 17836 - protein, 56 aa, Artificial Sequence
  Synthetic
VERILEEAERIVKELEEVLEESLRNVKEILKKLEDALRKSEEDVRRILERVEEEAR

SEQ ID NO: 17837 - protein, 59 aa, Artificial Sequence
  Synthetic
REVEEVLRRIKEMVKRIEELVRRSEDRAKKLVDTNRDLVRRSEERFRELVKEIEDVARE

SEQ ID NO: 17838 - protein, 55 aa, Artificial Sequence
  Synthetic
EELERVLREVEKVVRDVRRRNEKATRDVRRSVEESRRLDKRALDEVRKRIEEVRT

SEQ ID NO: 17839 - protein, 61 aa, Artificial Sequence
  Synthetic
RVEEVLKRVLDKLRESNKDSERLVREALKEHEEVNKEVEDRIREVLRRVEEVLKKVEKDKG

SEQ ID NO: 17840 - protein, 56 aa, Artificial Sequence
  Synthetic
AEDIKRLVDEIVDTDRKLVEEVKREAKESVKESEELVERVKRKADRIVEEVEKTVK

SEQ ID NO: 17841 - protein, 60 aa, Artificial Sequence
  Synthetic
DEVEEVRKTIERLVDRIEDVVRRVLELSRDTVRKNEDLVRRIEEELTKLVEDIKDVSRKR

SEQ ID NO: 17842 - protein, 55 aa, Artificial Sequence
  Synthetic
ELLEEVERLLEEVLRKAEKVIEDARKLDEDVNRKSNKVIEDVARRLEKVLKEVKD

SEQ ID NO: 17843 - protein, 60 aa, Artificial Sequence
  Synthetic
SVEDVIRRVKEKSEEVLKRLKEVIDEVKKRSEDVLKEVEDAIDEVRRRSEEALDRVRRAG

SEQ ID NO: 17844 - protein, 56 aa, Artificial Sequence
  Synthetic
SEEARDLADRDVEDVERVVTDIRRLVEKNVRDVRRVVREIEDAVRRNVKEIDRRVK

SEQ ID NO: 17845 - protein, 60 aa, Artificial Sequence
  Synthetic
SVEELIERVKRRSEKVLRDAEKTIRDLKKDSKRVNDELEKVIRDVMEKSKTALDEVRRRG

SEQ ID NO: 17846 - protein, 56 aa, Artificial Sequence
  Synthetic
SEEARRLVERDVEDVKRLVEEIKKLVTDNVRTVEDLVRRIKREAEENVKEIKEEVR

SEQ ID NO: 17847 - protein, 57 aa, Artificial Sequence
  Synthetic
SDVDRAVETNDKVVTEIVERVKEVVERNREIVERISTTVDEMVRRNRDIVRRVAERV

SEQ ID NO: 17848 - protein, 57 aa, Artificial Sequence
  Synthetic
VRDLVREVLERSDELVKRVEEEVKRLLERNKKLLDDVTEAAARLLKRNKEVVEELDK

SEQ ID NO: 17849 - protein, 57 aa, Artificial Sequence
  Synthetic
SEVDRVVEENDRVVRKVEEVVREAVERNETVAERVKDTVDRMVRENEKIVDKVRKDV

SEQ ID NO: 17850 - protein, 57 aa, Artificial Sequence
  Synthetic
VEKLVRDVLRESEKLVDDVRRAVKKLLEDSEELVREVKEAAEESLRRNKKIVEDLTR

SEQ ID NO: 17851 - protein, 57 aa, Artificial Sequence
  Synthetic
DELETVLREVERVVTEVKKLNERTVRDDKEVVERVLREIDKLLKEIREKVKEVKKKL

SEQ ID NO: 17852 - protein, 55 aa, Artificial Sequence
  Synthetic
EDVERTVRKLLEEIKDSVRKSKEDVRRSVEEIERLVRKVKEDVKRLLRDIRERAK

SEQ ID NO: 17853 - protein, 61 aa, Artificial Sequence
  Synthetic
SKVEKALKKIEDVLEDIKRLVEEVVERDERLLERLEEENKRADEKSKELVKRLTDLVRENK

SEQ ID NO: 17854 - protein, 59 aa, Artificial Sequence
  Synthetic
REALERIREILEEVRKAVEDLLRKIKETLKRIRERVKRLIENLEKSLEDARKEVDRLRK

SEQ ID NO: 17855 - protein, 61 aa, Artificial Sequence
  Synthetic
DVDERIEELLRRIERLVEESERDVRRLKREIDDLVTKSLKTVEESLKRIKELVDRVSEEAK

SEQ ID NO: 17856 - protein, 56 aa, Artificial Sequence
  Synthetic
KDDVERVVRRVLKEIDDSTKEIRRIVKRVLEEIERTTRDDKRVIDEVRELIKETSR

SEQ ID NO: 17857 - protein, 59 aa, Artificial Sequence
  Synthetic
DADELVTEVRKRVRETLEEIRTILDEVRKRVKKTVEDIRTEAERVKREVDKLVKEVRDN

SEQ ID NO: 17858 - protein, 56 aa, Artificial Sequence
  Synthetic
DREIEKLLDDNRRLIEEVLRRIDELVREDEELVKRVLDRIRTVLDRIREEVDEVRR

SEQ ID NO: 17859 - protein, 59 aa, Artificial Sequence
  Synthetic
DVRELLKKVEDEVRRTLKEIERILKEVKTESDKTLKEVAELLERLDRDVKRLVKEVRDN

SEQ ID NO: 17860 - protein, 56 aa, Artificial Sequence
  Synthetic
KEEIRKLVERNKELVRDVLRRIKELLKRDKEMLEEIRERIKEIEKRLKELLERAKR

SEQ ID NO: 17861 - protein, 61 aa, Artificial Sequence
  Synthetic
SEIEEVLKRVEEMIRRSKKLTDKVLREVEKMIRELDKKTDEVLERSERLARELKELVRRDV

SEQ ID NO: 17862 - protein, 59 aa, Artificial Sequence
  Synthetic
RERIEEILRRVTEAIKRSKEDSERIRETVTRLIRESEENSKRNLERVKKVIDELREEIR

SEQ ID NO: 17863 - protein, 61 aa, Artificial Sequence
  Synthetic
DKLEEVLKRVEEMLRELDKETDDVLKTVEDLLRRLDELTDEVLKESRRAAEELKRKVDRDI

SEQ ID NO: 17864 - protein, 59 aa, Artificial Sequence
  Synthetic
EEKIREIEKKARKLIKDSRKNIRDILETVKRLIEESDKNIKENEKRVRKVIDELDKEIK

SEQ ID NO: 17865 - protein, 61 aa, Artificial Sequence
  Synthetic
REKEEIIKKVKDVVKRVKEELKKIVEESERLVREVEEELKRSNEKSRDLVRRAEEELEKKS

SEQ ID NO: 17866 - protein, 56 aa, Artificial Sequence
  Synthetic
EEELDRLIKRVEDRARKVLEDSKRTIEEIEKVARDVLRRSEETVKEVEEKARRALK

SEQ ID NO: 17867 - protein, 61 aa, Artificial Sequence
  Synthetic
SAVEEIVKEVERIVREAEKALKKSVDDNRRIVEDAVRTLKRLVEEAARLVDEARKELTKKS

SEQ ID NO: 17868 - protein, 59 aa, Artificial Sequence
  Synthetic
EDVLRELKRLLKELERVVEEVLRRDRKWLEDTRREVKRVVEELKRLLDELREVVERARR

SEQ ID NO: 17869 - protein, 61 aa, Artificial Sequence
  Synthetic
KELEDLVREIEDTVDRIEREIRKLVEDDHRSVRKAEEDNRRLVKESEDLVRRIEEEIRKKE

SEQ ID NO: 17870 - protein, 56 aa, Artificial Sequence
  Synthetic
EEVMRRLKEDIERLMEEIRREVEKLNETTKEVVKESLETHKRIIERIREVAEETRR

SEQ ID NO: 17871 - protein, 57 aa, Artificial Sequence
  Synthetic
SSLEELLKEIRKRVERIKEELDRALKEDHDIVRKALRELDEMLKKNEETVRRAMERI

SEQ ID NO: 17872 - protein, 56 aa, Artificial Sequence
  Synthetic
EDVVRKVLEELEEEARRVLRELRESLKRTEELVRRALETLKRSDEETKKLVEDIER

SEQ ID NO: 17873 - protein, 57 aa, Artificial Sequence
  Synthetic
SSLEELIKEDHRVVREAEKRLEELLKEDHDRLREAKEELERVLKRDHETLKEVVERI

SEQ ID NO: 17874 - protein, 56 aa, Artificial Sequence
  Synthetic
EEVLKKIIERTRDLVRRALRTMEESIKRTEELVKKLLDELEASIRKTEEDADRIRK

SEQ ID NO: 17875 - protein, 58 aa, Artificial Sequence
  Synthetic
SSLERLIEEDHETVRRVKKTLDDMLKRDHEVVDEARRRLDELLKRDTDIVRDAVKRIR

SEQ ID NO: 17876 - protein, 56 aa, Artificial Sequence
  Synthetic
EEVLKKIIKETKELAKEAVERLEESIKETEDLVRRVLKEMEESLRRTEELVREIER

SEQ ID NO: 17877 - protein, 56 aa, Artificial Sequence
  Synthetic
SIEEVIERIREEAERLLKELEEVNRESTRLAEDLREELRRVLENSRALVKELKERI

SEQ ID NO: 17878 - protein, 59 aa, Artificial Sequence
  Synthetic
DKSLKELLRDVERKIREVRKRLKESLERVEREIRRVREEIKRLNDESRERIERVKRRVD

SEQ ID NO: 17879 - protein, 59 aa, Artificial Sequence
  Synthetic
DAEELLRRLDKSSKETLKRNEESLRRSEETSKRSLDTNRRSLEKIEKIATDLRRKLSER

SEQ ID NO: 17880 - protein, 55 aa, Artificial Sequence
  Synthetic
ERVVREAEKLDEDNTRHSRRNLEESKRLDEENIKRSEDLLRDVRRLIEEVLEEAR

SEQ ID NO: 17881 - protein, 60 aa, Artificial Sequence
  Synthetic
SKLDEILERAKKLIDDLRKESDDVLRRDRELIERIRRKSEEVLERVKRLIEELEDRVRKV

SEQ ID NO: 17882 - protein, 60 aa, Artificial Sequence
  Synthetic
EDEVRRVLRELERLVKELKDKNKESLDELKKTNDRLEEENRESLRRAREEARRILEEIRR

SEQ ID NO: 17883 - protein, 60 aa, Artificial Sequence
  Synthetic
DELEEILKRVEKLIRDSIEKIRRILEEDRELIKELIKESREVLERVRELIKTLEKKVKDV

SEQ ID NO: 17884 - protein, 60 aa, Artificial Sequence
  Synthetic
RRTVEEVLKRIEELVKRSLEESDRVAKEVRKTNEEVKKTNEDSLRKIKELVKRILEKIRK

SEQ ID NO: 17885 - protein, 60 aa, Artificial Sequence
  Synthetic
DELEDVLREVRKLIKELEKKSREVLKRDKELIDRIRKESEEVLKRVEDVLRKLEDEVRKV

SEQ ID NO: 17886 - protein, 60 aa, Artificial Sequence
  Synthetic
KRRVDEVLEEIERRVTELNKKNEESLRRAEKTNKELDEENKESLERIRKLIEDILRKIEK

SEQ ID NO: 17887 - protein, 59 aa, Artificial Sequence
  Synthetic
DELERILEEVKRRIERLIERLREVLERDKKLIEDIRRESEDVLRRVEEVIKKIREELER

SEQ ID NO: 17888 - protein, 60 aa, Artificial Sequence
  Synthetic
RETVKDVLRKLRKIADEVRRDIERVLDEARKTNKRLDEENKDSLKKLRDRAKELLDEVRR

SEQ ID NO: 17889 - protein, 61 aa, Artificial Sequence
  Synthetic
RELEEVLKEAEKLIREITEEVKEALRRDEKTVRDNIRDLRRVLEEVRKLIEEILDRVRRRG

SEQ ID NO: 17890 - protein, 56 aa, Artificial Sequence
  Synthetic
SKFLERLEELITRLKERIDKALRDLEKTNDELRKRSEEVLRRLERLLERLREEIRR

SEQ ID NO: 17891 - protein, 56 aa, Artificial Sequence
  Synthetic
SEVERVLEDSRRTNEEIIKRLRDALRESEKTNRDIEKRLREMLKKSKETNERIKRS

SEQ ID NO: 17892 - protein, 56 aa, Artificial Sequence
  Synthetic
KKVLDKARELVRRTEEIVKDVIRKSRELVKESKERVDRVITESRRVVKKTLDDIRK

SEQ ID NO: 17893 - protein, 56 aa, Artificial Sequence
  Synthetic
SEIEEALKRSKETNERIIRKLEEVLRRSRKTNEEIIRRVERVLEDSERTNREIEKS

SEQ ID NO: 17894 - protein, 56 aa, Artificial Sequence
  Synthetic
EEFLRTVKKLVDDTRKAVEEVITRSRRLVEESERRVREVIDRMRKLVEETKRKLDK

SEQ ID NO: 17895 - protein, 56 aa, Artificial Sequence
  Synthetic
SEIEKALKESEDTNRKIKDDLRKVAERVRKLIEDVIRTLERVLRDSERTNREITRS

SEQ ID NO: 17896 - protein, 56 aa, Artificial Sequence
  Synthetic
EDVLRKAKRLVDETLKEVERVIRELEKLVEDLEETVKEVIKRSRELVDETEKRIRD

SEQ ID NO: 17897 - protein, 56 aa, Artificial Sequence
  Synthetic
EEIERALKKSEETNRDIIRKLREVNERDKRAVERDEEELKKALDESRKTNEDIRKS

SEQ ID NO: 17898 - protein, 56 aa, Artificial Sequence
  Synthetic
KDVLETVRKLVEDTLREVERVITHSLKRVEDTLRKAKEIADRMRTLVRKTLEDIER

SEQ ID NO: 17899 - protein, 56 aa, Artificial Sequence
  Synthetic
DEVERVLEKSKRTNEDIIRRLEEVNKTDRKLVEDDIRRLEKALRDARKTNEEIRTS

SEQ ID NO: 17900 - protein, 56 aa, Artificial Sequence
  Synthetic
EDVLRKVRELVERTKERVERVIDHSRKVVETTLREVERVIREIEELSKDSERKIRK

SEQ ID NO: 17901 - protein, 56 aa, Artificial Sequence
  Synthetic
SDAERALKESEDTNREIIEKLERVNKRDKDIVDKIREDLKRVLERVRDTNRRIRES

SEQ ID NO: 17902 - protein, 56 aa, Artificial Sequence
  Synthetic
ERVLREVKRLIDETKRIVDEVIKHSKEEIDKLREEVERVIKELRELSDKSLDDIRK

SEQ ID NO: 17903 - protein, 56 aa, Artificial Sequence
  Synthetic
KEIEDVLKKSEDTNRRIIERLRKANDTDRRLIEDTIRKLREVLKEAEKTNKDIKDS

SEQ ID NO: 17904 - protein, 56 aa, Artificial Sequence
  Synthetic
EDVLRTVEELIERTEREVERVIAHSEDLIRRSNEDVKRVIKTIRELSEDSKRAADK

SEQ ID NO: 17905 - protein, 56 aa, Artificial Sequence
  Synthetic
DEERVLKELEDLLREILKDIERTVRESRKLVKTILDEIEEVARHNRKLIEEIRREV

SEQ ID NO: 17906 - protein, 56 aa, Artificial Sequence
  Synthetic
LKELLETVRRVIEEVKKVLKRSLEESKKVIDDVRRHLEKNNRDIKTVIDRVREKAK

SEQ ID NO: 17907 - protein, 55 aa, Artificial Sequence
  Synthetic
SVEEVVEEVKRLIEEVEKTNKKTVEDSKRLIDDIRRRIEEVMRHNRELIKKIERE

SEQ ID NO: 17908 - protein, 56 aa, Artificial Sequence
  Synthetic
LRELLERVRRLVEESKRNAEESLRRSEKVIKEATDHLRRNNETIKRVIDRVREEAK

SEQ ID NO: 17909 - protein, 55 aa, Artificial Sequence
  Synthetic
DTERVLKTLRDLIDTILKRNEEILRHNEKLSRDSKRRIEEVARHNRDLARRVEEE

SEQ ID NO: 17910 - protein, 56 aa, Artificial Sequence
  Synthetic
LRKLLEDVKEIIKTSKENVDRNNDRIRRVVERSEKHLEDNNRDVKRVVDEVREEAR

SEQ ID NO: 17911 - protein, 59 aa, Artificial Sequence
  Synthetic
KEEEDIKREIEKRITEIKKKNEEVLRRVEELIKRIHELNKRIEDTIDEEIRRIEDLVRR

SEQ ID NO: 17912 - protein, 56 aa, Artificial Sequence
  Synthetic
DDVLRKLKRLLDEIIKHSEDVLRKIKELLDEIKRDSDRVFKKLKELLDRIAREIEK

SEQ ID NO: 17913 - protein, 60 aa, Artificial Sequence
  Synthetic
RELEEIDRKIKKLIEDIHRENRDILRRIRELIERIKKKNEDILREVRKLIKEIEDLVREG

SEQ ID NO: 17914 - protein, 56 aa, Artificial Sequence
  Synthetic
DKVLKKLEDLLREIKKDSDRVLEEARKLLEEIKRHSDEVLEEIKKLLDDIKKRVET

SEQ ID NO: 17915 - protein, 59 aa, Artificial Sequence
  Synthetic
SELEKIDDEIRKLIEDIHRLNREIARRNEKTIREIRKKNEDVLRRNKRSADEIDRLVKE

SEQ ID NO: 17916 - protein, 56 aa, Artificial Sequence
  Synthetic
SEALRKLKRLLEEIERDSRRVLDELHKTDEDIERHSREVEDRAHKTDKTIKDRVET

SEQ ID NO: 17917 - protein, 60 aa, Artificial Sequence
  Synthetic
SEDEKILEEVRREIERIHEENRKVRERIERLIREIHKLNREVLERNKESIEEIRRLVEEG

SEQ ID NO: 17918 - protein, 56 aa, Artificial Sequence
  Synthetic
SKFLEDIERLLREIDKDSKRVLEELKRLLDEIRKDSDRVLKTAHDTDDKILKDIDK

SEQ ID NO: 17919 - protein, 59 aa, Artificial Sequence
  Synthetic
KEEDEVREEIKRRIEEIARLNKEIEDEIRELIKRIHELNREILKKVRKLIEEIEDLVRK

SEQ ID NO: 17920 - protein, 56 aa, Artificial Sequence
  Synthetic
SEVLRELDELLRRIKKNSEDVARKLKDLLRRIREDSERVAKEIRRLVEEIKKKVDK

SEQ ID NO: 17921 - protein, 61 aa, Artificial Sequence
  Synthetic
DEVKRIVDEVRRLVEKVHRVNEEVVKESEDLVREVHRKNKRVLDESERLVEEVERVLKRDV

SEQ ID NO: 17922 - protein, 55 aa, Artificial Sequence
  Synthetic
ERVLRTAEEVIRRLEKHSKDLLDTSRRLAEEILRKSDDLLRRSKEKIDDLKRKIK

SEQ ID NO: 17923 - protein, 61 aa, Artificial Sequence
  Synthetic
SEVDRIKEEVRKLLEEHHKRNEDIVREVTRLLEEHHKKNEEVVRESEKLVKKIREILRDRV

SEQ ID NO: 17924 - protein, 55 aa, Artificial Sequence
  Synthetic
ERVLEEARKVVRELNRRSEELLKRARELVERLDRKSEELLRKSERIIKKIEEDIR

SEQ ID NO: 17925 - protein, 61 aa, Artificial Sequence
  Synthetic
KEVEEIVRDVRRLVEEHHRENRKIVETVEDLVRKVHRENKRVVEESERLVDELTKILRDTL

SEQ ID NO: 17926 - protein, 55 aa, Artificial Sequence
  Synthetic
EEVLKRVREAIRRLNEDSKRLLKEARDVVERIKRNSDKALEESKRKLKEIEERIK

SEQ ID NO: 17927 - protein, 61 aa, Artificial Sequence
  Synthetic
SKMEEVRRRIKEEADRDEEDNRRVLEDIRRLIEENKRRNEEVLKRIEKKARDLLERIKKDG

SEQ ID NO: 17928 - protein, 55 aa, Artificial Sequence
  Synthetic
EEIIKEVSTLNEKLKRDTDEILKEVTRLNERLKEETDRILEEVKKLIDKVRKAVE

SEQ ID NO: 17929 - protein, 61 aa, Artificial Sequence
  Synthetic
KEADDVKRRLDDLIRRNEEKIRDVRRRVKELVDRNRKKIKEVLDKVKEIIDRLKDEIDKTG

SEQ ID NO: 17930 - protein, 55 aa, Artificial Sequence
  Synthetic
ERIIEEVTRENDRLRKESDRVLDEVSKLNDEARKETDDVLKTVDELVREVAEKAK

SEQ ID NO: 17931 - protein, 61 aa, Artificial Sequence
  Synthetic
SDAERLLETVRRIAKRLKELNEEVLREAKRIIDRVREENERSRETIREIMKKLKEDIDRIG

SEQ ID NO: 17932 - protein, 56 aa, Artificial Sequence
  Synthetic
VDEILRDVERLLEEVRRSVKESTRRIKRLLDEVRKSVKESTKEIKKLLKDVEDAAR

SEQ ID NO: 17933 - protein, 61 aa, Artificial Sequence
  Synthetic
KDIEDLRRRIEEIIEEAKRLDKTSLELIRRIIKRIKDENKKMLDEAEKIIRDALKTIDDVG

SEQ ID NO: 17934 - protein, 56 aa, Artificial Sequence
  Synthetic
VEDVTRRIEELLEEVRKSSEDSIRDIRRLLKEVRDSFKRSSDELKRLLDEVRKRAE

SEQ ID NO: 17935 - protein, 63 aa, Artificial Sequence
  Synthetic
RELEEVVKELRRLLEEVRKRVEDSIKRLDELLDEVRRSNKKSSEDTRKLLKELEDEARKVMER

SEQ ID NO: 17936 - protein, 56 aa, Artificial Sequence
  Synthetic
VREVREEIERIVTKARKVVKEDDDLVKRIVAEARRLSKESEEKVREIVKRAEEKVR

SEQ ID NO: 17937 - protein, 55 aa, Artificial Sequence
  Synthetic
DEVEELREELERLLKESEDRLREVKKRSDDSLKESRELIKKVRDTLERLLREVED

SEQ ID NO: 17938 - protein, 56 aa, Artificial Sequence
  Synthetic
VETVAREVRERVERSKRHIEKVLKEDEEMVRESKKNIEDLLRRVKEDIDRLKEEVD

SEQ ID NO: 17939 - protein, 55 aa, Artificial Sequence
  Synthetic
SKADRLREELDRLLKEVKELNERSKRESDRSLEEIKRLIEKVERESEKTLREVRA

SEQ ID NO: 17940 - protein, 56 aa, Artificial Sequence
  Synthetic
IDTVVEEVKKLIKEILDHIRELVEDDKRKIKEILEEIKKLAEDDRRKVEEVKRKVD

SEQ ID NO: 17941 - protein, 57 aa, Artificial Sequence
  Synthetic
SDVEDLKKKLDELLEEVERTSREVRKTSERSLEEVEKLLRRVKEESKRLLEEVERDI

SEQ ID NO: 17942 - protein, 56 aa, Artificial Sequence
  Synthetic
VKKVLDDVKKLVDDVKRKDKKLLDDDRRRVEEALEHIKRNLDRSRDLIRRIKEKAK

SEQ ID NO: 17943 - protein, 57 aa, Artificial Sequence
  Synthetic
DEVKKLKDDLDRLLDEIRRKIEKVRKDSEDSLKRVEELIRRVEEESRRLLEDVKREI

SEQ ID NO: 17944 - protein, 56 aa, Artificial Sequence
  Synthetic
IKKVLDDVRREIRRIDEEIKRVEEEDRRMVTELLKHIERNLERSKRLADEVKEKAR

SEQ ID NO: 17945 - protein, 55 aa, Artificial Sequence
  Synthetic
KEVDELRKALKELLDEVRETSKRVLDETRRLLEEVRRELERVKRESDETLKRIKD

SEQ ID NO: 17946 - protein, 56 aa, Artificial Sequence
  Synthetic
VDTVLEDVKRKIDELKEHDKRNLDESRRLITELLERIKKLAEDDRRVIEEIERRIQ

SEQ ID NO: 17947 - protein, 60 aa, Artificial Sequence
  Synthetic
KTMDEIKKEVTDLVRRIRELNERVERTVEDLVRKSRRLNERVLREVERLVKEVRDALRDK

SEQ ID NO: 17948 - protein, 59 aa, Artificial Sequence
  Synthetic
DETLEKVVDDVRKRIKRSKEHSDEVLEDAKKKIDENLEHSRRVLEEAKKLIDDLKDEIR

SEQ ID NO: 17949 - protein, 60 aa, Artificial Sequence
  Synthetic
EKAERIIEEVTDLVRRVRETTKTVKEEVRKLVERSKRRNEEIRREVKELVDEVEKKLREK

SEQ ID NO: 17950 - protein, 59 aa, Artificial Sequence
  Synthetic
KDALEKVRRDVERLIRELEKTDRDVLEEVKKLIEESERNSDRILEEVRRIIEELKKKIK

SEQ ID NO: 17951 - protein, 60 aa, Artificial Sequence
  Synthetic
SVVDEIRERVERLLREVEKTTEELRDTVRKLVEESEELTKRIEDEVRKLVEKVRRELRRK

SEQ ID NO: 17952 - protein, 59 aa, Artificial Sequence
  Synthetic
EDKLREVLEEVKERIDRLKELDKKILEDVKRLVKESKEELKDILRRARKLIRDLEEKIK

SEQ ID NO: 17953 - protein, 60 aa, Artificial Sequence
  Synthetic
SEVEKMLKELKELVERALERDKDALRKLRDLVRESLERDKRMVDKLDELVKEIEDRIRKR

SEQ ID NO: 17954 - protein, 59 aa, Artificial Sequence
  Synthetic
REKVDKIRRDVKRLLDESRESLERSEKDVEKLLEDSRDSLRKSKKRVEELVKRVEEALK

SEQ ID NO: 17955 - protein, 60 aa, Artificial Sequence
  Synthetic
REVEEALKESTDTIKKILDDDRKAMDELKKLVDKSLEDDKRAVDRLRELVKEIKKIIKKR

SEQ ID NO: 17956 - protein, 59 aa, Artificial Sequence
  Synthetic
KEDVDRIEEESRRLNEESRDSLRKSEDTVRKLLEESKESLDRSRREVEKLLKEVEDALR

SEQ ID NO: 17957 - protein, 61 aa, Artificial Sequence
  Synthetic
SELEELDREVEELVERSKRTNERVVEESKRLVDESRRDIDRLLEEVRKLVKDILERIKEEG

SEQ ID NO: 17958 - protein, 59 aa, Artificial Sequence
  Synthetic
SEDVRRLLEKIERLIEESNRSLERSREESERLSKESEDRLRELEKTVKELLKRVEEALR

SEQ ID NO: 17959 - protein, 61 aa, Artificial Sequence
  Synthetic
DEIRELLKKAEELVERSLRDNEKVVDELKKLVDESLRRIREMLKRAEDEVRKILEDIERKG

SEQ ID NO: 17960 - protein, 59 aa, Artificial Sequence
  Synthetic
SDEVDTLRRTVDKLVKDSNRSLEESKRTLEDLIRRSKEELDKLEKDVRRLLDEVRKALK

SEQ ID NO: 17961 - protein, 60 aa, Artificial Sequence
  Synthetic
DELEDAMRRVEEMAERSERNIRRSIRKVEELVTRSKKNIEDSLREVEKVAREAEELLRRN

SEQ ID NO: 17962 - protein, 55 aa, Artificial Sequence
  Synthetic
EEVKRRLDELLKRVTDLDRDSEKKLRELLEEVTKLDKESKDRLDELLEKVRRDRE

SEQ ID NO: 17963 - protein, 61 aa, Artificial Sequence
  Synthetic
SEVDKLLDRLTKLAKRSIDEARRLVERDREVLEKSIRDAEKLVERDEKVLEDIKRLIEREG

SEQ ID NO: 17964 - protein, 55 aa, Artificial Sequence
  Synthetic
ETVRRLVTELNKASKKVVDDVRRESEKSNRDSEDVVRKVKKASDKSLEDVERDIR

SEQ ID NO: 17965 - protein, 61 aa, Artificial Sequence
  Synthetic
EEVERIVERLKRLAEEDSREIKEVMDRNRESVRRILKRIKDIVEELRRLVEEIKKKIEKDG

SEQ ID NO: 17966 - protein, 59 aa, Artificial Sequence
  Synthetic
KEKVERLEKDIRRLEKESEDALRRLEDTSKRTDDEIERAIEELERTITDLVREIRERVR

SEQ ID NO: 17967 - protein, 60 aa, Artificial Sequence
  Synthetic
REVDEIRKELDDRVREIKKRIEEAVEDSRRTVEEIKRRVEEVDKTDRKLVEDIKREIDRR

SEQ ID NO: 17968 - protein, 59 aa, Artificial Sequence
  Synthetic
RKKAEELRDRVRKLVEEIERLLEELRRTLEKTRREIERVVEENRRSVEELIREIKERVD

SEQ ID NO: 17969 - protein, 60 aa, Artificial Sequence
  Synthetic
DDERRVKEEIKRILTEAKKVIDENKRRSEEVLDRVRKLVKENKDENDEVLKTVDELVRRG

SEQ ID NO: 17970 - protein, 55 aa, Artificial Sequence
  Synthetic
EEVRKELKRVLDEVRRLVKETEETDRTSNRTVAELAKDLEKKTDDIEREVRKKVT

SEQ ID NO: 17971 - protein, 61 aa, Artificial Sequence
  Synthetic
DRVERILKKIEDALRKVEELIRRNKKKIDDVLDEVRRLVEESKKRIDEILDEVRDRITKLK

SEQ ID NO: 17972 - protein, 58 aa, Artificial Sequence
  Synthetic
KEAKRLKDLLDTVRETVKRLNDELRKRSEEVLRRVDKLNKESKKRLDEVLRTVREELR

SEQ ID NO: 17973 - protein, 60 aa, Artificial Sequence
  Synthetic
REIEEVKKENDKSLKEIEKIIREVKEENKRSLDKIKRIIERALEEIKRMLEKAKKLADEG

SEQ ID NO: 17974 - protein, 59 aa, Artificial Sequence
  Synthetic
DKFLTEVKRSFEKSVEDIKRLLKEVSESVKRSTDEIRRLLDEVRRAVEEVLRRIRELLR

SEQ ID NO: 17975 - protein, 57 aa, Artificial Sequence
  Synthetic
SLVEELRRVVEEVRKTLEELVKRLEDSVRRSAEEIRKLIEDAERSVRESERAVKETG

SEQ ID NO: 17976 - protein, 58 aa, Artificial Sequence
  Synthetic
KEIKELLEEIKEMLRRLKKKAEDIDRTNRELEKEVRELVERLLRDNRRLLKEVVERAK

SEQ ID NO: 17977 - protein, 57 aa, Artificial Sequence
  Synthetic
DKIEEAKKNVDESKRRVEELIRELRESVERSKRDVERLVRELEESVERSLETVKRDG

SEQ ID NO: 17978 - protein, 58 aa, Artificial Sequence
  Synthetic
KEVKELLKRNSDLLRRVEELVKKLDKENRDLLRKVREDAKKLLKENEDLLEKVKRDAR

SEQ ID NO: 17979 - protein, 57 aa, Artificial Sequence
  Synthetic
DEIEKAEKNVRDSRREVERVVKKLKESVDKSREEVERLVRELERSVEESRRLVEERG

SEQ ID NO: 17980 - protein, 58 aa, Artificial Sequence
  Synthetic
KEVDRLLERNSRLLEEVEERAKELDERNKKLLEEVRRRAEEVDKRNKDLLRTVDRRAR

SEQ ID NO: 17981 - protein, 57 aa, Artificial Sequence
  Synthetic
SLIEEARENVKDSKKKVKELVDRLRKSVEESRERVREVVRRLRESVDTSADAVRKAG

SEQ ID NO: 17982 - protein, 58 aa, Artificial Sequence
  Synthetic
EAVKRLLEENSKLLADVADEARKLNEENERLLREVEKKAKKLDDENRKLLEEVIETVR

SEQ ID NO: 17983 - protein, 57 aa, Artificial Sequence
  Synthetic
DEIEELKKNVEDSRREIDRLIKELKESVEKSRKDVEKVVKELRESVKDSLDKLEKTG

SEQ ID NO: 17984 - protein, 58 aa, Artificial Sequence
  Synthetic
KEIKELLKENSDLLERVREEAETLDRKNKELLERVKRKADRLNEENRRLLKEVIEKAR

SEQ ID NO: 17985 - protein, 60 aa, Artificial Sequence
  Synthetic
SEVEKLLRDLERLLEEIVKEAEDLDRENKERLKEIARKARELNEENKDLLRRVKELVDRN

SEQ ID NO: 17986 - protein, 59 aa, Artificial Sequence
  Synthetic
ERLVREVERVIREVRKRVEEVVRKVEESIKESEERVKELVKRVTDSLERSKKEVEDAIR

SEQ ID NO: 17987 - protein, 58 aa, Artificial Sequence
  Synthetic
SEVEELLKRLEDILRENERRARELNRKNKEVLKDNRRRAEEVNRRNKRMLDEAERLAE

SEQ ID NO: 17988 - protein, 59 aa, Artificial Sequence
  Synthetic
EKLVREVETKIEEVRRRSEELVKEVEKSLKESEDDSRRLVREIEESIRESEERIKRRVE

SEQ ID NO: 17989 - protein, 56 aa, Artificial Sequence
  Synthetic
DEVEEILEKSRRTLEENKRRAKEAVRRSRETLRESEERVKRVVEELRDRLRRIEEE

SEQ ID NO: 17990 - protein, 59 aa, Artificial Sequence
  Synthetic
EDALRKIKKVLDETETESRRTLEELRKVLEETHRRNEKLIRDLREVLKEIEEAVRRREK

SEQ ID NO: 17991 - protein, 56 aa, Artificial Sequence
  Synthetic
DEVEEALRRLEDLLRRNVEEAKEVVKDSERTLREDAERVKRVVEKSKRTLEAIEKR

SEQ ID NO: 17992 - protein, 59 aa, Artificial Sequence
  Synthetic
EEAVRRIEEVLKKIREDSKRTIDELRRVLERTEEETRRLIKELEDVLRRTEEEVKRRLK

SEQ ID NO: 17993 - protein, 61 aa, Artificial Sequence
  Synthetic
SEVEKVLEEIKRLLDRIKERVDETDRRNKELLKKIKDEVRRAVEEIRRLLEEIKKSADEKG

SEQ ID NO: 17994 - protein, 59 aa, Artificial Sequence
  Synthetic
EKLVREVEEVVTRVRKTIEDLVKKDNDSVRKSEERIKEVVKRIEEEVKRVLEDVDRLAK

SEQ ID NO: 17995 - protein, 57 aa, Artificial Sequence
  Synthetic
DEVRELLERNRRLLEEIKKTVKDLIRRNEELLKRIEDDAKRLIDRNEELLDELEKRL

SEQ ID NO: 17996 - protein, 59 aa, Artificial Sequence
  Synthetic
GEELEELRRVVEESDETIKRLLEEAKESVDRSLDRIRKLLEDVRRSVERSKKRIDEKRK

SEQ ID NO: 17997 - protein, 57 aa, Artificial Sequence
  Synthetic
DEVRKILKDIEDILREIEERVKRVIERNKRILEKIREDVKRVDDRNKKLLEELERKL

SEQ ID NO: 17998 - protein, 58 aa, Artificial Sequence
  Synthetic
DDLRRVEEVAKRIKDRIRELLDEIRRSVERSKRDVKRLLDELRRSVEESKRRIDEREK

SEQ ID NO: 17999 - protein, 57 aa, Artificial Sequence
  Synthetic
SEVDKLLRENEKLLEDIERTVKRMLERIKKLNDDVHREIRRIDEENRRLLDEIEKKV

SEQ ID NO: 18000 - protein, 59 aa, Artificial Sequence
  Synthetic
GRDLDRLRRVVEKSKKRIEELEREARKVAKDVKKNLEELLEEVKESVRESEKRIKETEK

SEQ ID NO: 18001 - protein, 60 aa, Artificial Sequence
  Synthetic
SLKERIEEELKKVKDTSDRLNEEVRRSVEDTRKRSEDLNEEVRRSVEESRRRVESLLKRI

SEQ ID NO: 18002 - protein, 59 aa, Artificial Sequence
  Synthetic
EEEVKKIIERIEEILERSERRNREIIKRDEEALKRSEERNREIIERDKEMLERLEREVR

SEQ ID NO: 18003 - protein, 60 aa, Artificial Sequence
  Synthetic
SLIETIKEVVKRVAETSKRLNDRVREELRKVEREVEELNREVERVLREVETAVDDLVKKI

SEQ ID NO: 18004 - protein, 59 aa, Artificial Sequence
  Synthetic
REEAEDIIRKIEEVLKKSKELNDRIIERIKKMLEDLRRHNEEIIEKIRRALKRLEDEAR

SEQ ID NO: 18005 - protein, 60 aa, Artificial Sequence
  Synthetic
SLKETIRELLKRVEEESRKLNEDVARSVRETKRRSDRLNEEVERSVRRSEEEVRRLLKRI

SEQ ID NO: 18006 - protein, 59 aa, Artificial Sequence
  Synthetic
KEKAEEIIRRIKEMLRRDEEENRRIIERDERALDKSRRLNEKIIEEDKKAMRDLEEEVK

SEQ ID NO: 18007 - protein, 60 aa, Artificial Sequence
  Synthetic
SEVEEIIKENRRTLERDRREVEKVIEENKRSLEEIERKVREIIKDNDRSAKEITELAKAG

SEQ ID NO: 18008 - protein, 59 aa, Artificial Sequence
  Synthetic
EELVDRLRKSLRDVREESKKLIDELRRSLEESDRRVKELIDRLRKSLDDSRKLVDDLRR

SEQ ID NO: 18009 - protein, 60 aa, Artificial Sequence
  Synthetic
SEVEEIIKDNERTLEEIRKRVEDVIREIRRLLERIERRVREAIKRNEESLRRIKELVERG

SEQ ID NO: 18010 - protein, 59 aa, Artificial Sequence
  Synthetic
DELVRTLRESLRRVAEEVKRLLKEVEDVAREVEDRVKKLIEDLRRSLEKSREDVERDSK

SEQ ID NO: 18011 - protein, 61 aa, Artificial Sequence
  Synthetic
DRVREIIKRLRDLLREIRTVVRKIIEDNRKSLEEIEEHNRRVIRELRELLKEIKETVEREG

SEQ ID NO: 18012 - protein, 59 aa, Artificial Sequence
  Synthetic
EEMIRTVKKVITEIAEEVKRLADEVRDSVRRSEEAVRRLTKETKEVVDDIVRRVRELIE

SEQ ID NO: 18013 - protein, 61 aa, Artificial Sequence
  Synthetic
KKVEEIIEELKKLLREIEEHNKRVIEENERSLEEIKRHNEEVIEELRELLERIEEVVKRKG

SEQ ID NO: 18014 - protein, 59 aa, Artificial Sequence
  Synthetic
EDMIRTVEDVVRRIERRVRELSRESEESIRRSTETVKKLTKDTRDVVRRILKTVRDRIK

SEQ ID NO: 18015 - protein, 64 aa, Artificial Sequence
  Synthetic
SLEERLREVLKDIERRVRELNETNKRVLDKSKTTVDELLKRLREVLEEIREEVRKLIEELARRG

SEQ ID NO: 18016 - protein, 59 aa, Artificial Sequence
  Synthetic
REMIEKVLRDLEELAKRIEDKNRETIKESEKTLEEIRRRVDRLLEELRRLLKEIAKEVK

SEQ ID NO: 18017 - protein, 64 aa, Artificial Sequence
  Synthetic
SLEETLEKVLRDITERSERLIRENEKNLRDVKREVEKLNERNRDVLKKIREKVRELIEELRRKG

SEQ ID NO: 18018 - protein, 59 aa, Artificial Sequence
  Synthetic
EEAIRKVLEELKKLLEEDERRAKRVSEESKELLDRLAEDNERTIRKLERLLEELERRTK

SEQ ID NO: 18019 - protein, 60 aa, Artificial Sequence
  Synthetic
SEVDKVLEELKKLLDDDRREVERLLRELRRLLDRDRREVEKSIRTLEKLLKEIEDIVRER

SEQ ID NO: 18020 - protein, 59 aa, Artificial Sequence
  Synthetic
KRALERVREVLERAEDESRKLSERIKKVLEDIERESKRLSEEDREVLKRIKEEVERLEK

SEQ ID NO: 18021 - protein, 60 aa, Artificial Sequence
  Synthetic
SEVDKVLEELKELLKRLEEDVKRSSKESEDLLRKDEEDVRRSIRELERLLEEIEERVRRR

SEQ ID NO: 18022 - protein, 59 aa, Artificial Sequence
  Synthetic
ERALREVRKVLEDIKKSVDELLKEDKDNLRETARESERLSREDKKVLERIEERVKELED

SEQ ID NO: 18023 - protein, 60 aa, Artificial Sequence
  Synthetic
SEVEKVIEELKKLADDDRRRVEKSLRELRKLLEELEKRVRDSLEKLKKLLKEIEDRVRRR

SEQ ID NO: 18024 - protein, 59 aa, Artificial Sequence
  Synthetic
EKLLREVRKVLREARETSRELSRADEKVLRDIRREVKRALDADKKVLDDIRERVKELEK

SEQ ID NO: 18025 - protein, 60 aa, Artificial Sequence
  Synthetic
DEVEKILKEIDDAVKDLKRKSDKSLTDDRRMVEELKKKSEESLREVEEMVRRLEDEASRT

SEQ ID NO: 18026 - protein, 59 aa, Artificial Sequence
  Synthetic
EKVVRRVRDILDKLRKTVERLVEENEDSARRTEETIRKLVKDNEDILRELRRLIEERRT

SEQ ID NO: 18027 - protein, 60 aa, Artificial Sequence
  Synthetic
SEVEEMLERLKELLRRIEKVVRDSLRRLKELMRRDEEEVRRSLRRLEELLKEIERVARER

SEQ ID NO: 18028 - protein, 59 aa, Artificial Sequence
  Synthetic
KKVLDEVKELLERIEETVRRLIEENERVLEEAEELSRKLSEDNEKVLEDARREAERLTK

SEQ ID NO: 18029 - protein, 60 aa, Artificial Sequence
  Synthetic
DEVEEVLKELEKLAREDEDRVRKSEKKLRELADKDREDVERSLRRLERLLEELKRVVEER

SEQ ID NO: 18030 - protein, 59 aa, Artificial Sequence
  Synthetic
KDMLERVERLLREAEKLSEKLSRDNEDLLRRARDLSRELSKENERLLEDIRRRVEEAIK

SEQ ID NO: 18031 - protein, 60 aa, Artificial Sequence
  Synthetic
REVEEVLERLKRLLDTLEREVRKSLEELKRLLDELRKESKKSLDELRKLAEELERVVRRL

SEQ ID NO: 18032 - protein, 59 aa, Artificial Sequence
  Synthetic
EKMLREVKRVLEEAERRVRELIEENKRLLKEIKEEVKKLIEENEKVLEEARRLAEELKK

SEQ ID NO: 18033 - protein, 60 aa, Artificial Sequence
  Synthetic
DEVREVLKKLEKLADELREEVRKSLEDLKRLLREDEERSKESLKDLERLAREIEEVVKKK

SEQ ID NO: 18034 - protein, 59 aa, Artificial Sequence
  Synthetic
EKALRDVEELLRRIEERVRRLIKENEDLLREIEKTSEKLSRDNKELLKEIEERVRRLRQ

SEQ ID NO: 18035 - protein, 60 aa, Artificial Sequence
  Synthetic
DEVEEALKTLEELMRRDKEEVDKSLEKLRRLLKEDEDRSRESLERLKRLAEELEEVVKKE

SEQ ID NO: 18036 - protein, 59 aa, Artificial Sequence
  Synthetic
RRVLERVKKLLEDARRLSERLSEENERVLEEAKRRSEELSKRNEDLLREIEKKMKEDTR

SEQ ID NO: 18037 - protein, 60 aa, Artificial Sequence
  Synthetic
SEVEKVLEELKKLADDLRRTSKRSEEELEKLARELEKRVRESEKRLRDLLRELEDVVRKK

SEQ ID NO: 18038 - protein, 59 aa, Artificial Sequence
  Synthetic
KDALKRVKELLDRIREEVEKLIRRNEKLLRDIEEKVRTLLERNERVLEEIKKKVDDDIK

SEQ ID NO: 18039 - protein, 60 aa, Artificial Sequence
  Synthetic
DEVREVLEELRRLMKELRDVSEKSLRDLRKLAEEDKDRVRKSLEKLRELLRTLEDVVRKR

SEQ ID NO: 18040 - protein, 59 aa, Artificial Sequence
  Synthetic
EKMLREVEDLLRRAEKEVRRLIEENKKLLKEAEETSRKLSKENEDVLRDIRRAVEELKR

SEQ ID NO: 18041 - protein, 60 aa, Artificial Sequence
  Synthetic
SEVEKALEDLERLAKELEKVSRESLRRLEKLLEDDRRRSKRSLEELEELLDRLRDTVRRR

SEQ ID NO: 18042 - protein, 59 aa, Artificial Sequence
  Synthetic
EKALREVRDLLRRIEERVKKLIEDNRKLLEDARRESERLSEENKRVLEKIEREVKKLED

SEQ ID NO: 18043 - protein, 60 aa, Artificial Sequence
  Synthetic
SRVEEVLKKLEDLLRRLEEVSERSLRELRELVKRLEDVVRRSEKKLKELADRIEEVVRRR

SEQ ID NO: 18044 - protein, 59 aa, Artificial Sequence
  Synthetic
KKALDDVRRLLEEIEKRVTELIERNRRLLEEAEDRVRKLLRDNEELLKRIEKLVRDLER

SEQ ID NO: 18045 - protein, 60 aa, Artificial Sequence
  Synthetic
SRVEEVARKLEDLLRELKRVSDESLKTLEKLMTDDERRVRESLDKLRELAREIDEVVRRR

SEQ ID NO: 18046 - protein, 59 aa, Artificial Sequence
  Synthetic
EDALREVRRLLERAEELVRELIKRNEDVLREAKRTSDELSERNRRLLERIKETVDRKRK

SEQ ID NO: 18047 - protein, 57 aa, Artificial Sequence
  Synthetic
REVEEILKRIEELLRRIKKLSEETLREIAKLLEDIKRLSEETLKSNKDLLKRVRDEL

SEQ ID NO: 18048 - protein, 59 aa, Artificial Sequence
  Synthetic
SRMLREIERIIKELKELVDKLLEDNERLIERLDREVKRLLEENEKSVREASREIDERRR

SEQ ID NO: 18049 - protein, 57 aa, Artificial Sequence
  Synthetic
DEVEELLRRIERLVEEARRLVEELLETNKKLLKDIEKLSRDTLKSNEELLREVKDRV

SEQ ID NO: 18050 - protein, 59 aa, Artificial Sequence
  Synthetic
SEMLRRLETIIREAERDLRRLLKEARDSVKKVSDEIKRLLEENKRSVDRVSREIKRVEK

SEQ ID NO: 18051 - protein, 59 aa, Artificial Sequence
  Synthetic
DEVEELLKEIRELIEEARRRIEELLKEDRDIVRRVTELSRRTLEKIKDLIRKIKDIADR

SEQ ID NO: 18052 - protein, 59 aa, Artificial Sequence
  Synthetic
SEMLRRLEELIKEIEDLVRKLLEELKRSVRETEERVRKLKEDNDELIKRIDELVKEREK

SEQ ID NO: 18053 - protein, 60 aa, Artificial Sequence
  Synthetic
SSLDDLRRLAEELLRTNKKLMEDLRRTNEKLIKEIEDVLRRIRESSKRIKEEVDKLTRDV

SEQ ID NO: 18054 - protein, 59 aa, Artificial Sequence
  Synthetic
RKVLERVKEAVDEVRRSVEESLRDAKRMDEETRKTVEDVRREVTKSVEDVKRRIDESRK

SEQ ID NO: 18055 - protein, 60 aa, Artificial Sequence
  Synthetic
DEVDEVVREVERLLEELRKENDKSVEEDKRLVDKLREEVKRILEEVRKLLEDLARKAKED

SEQ ID NO: 18056 - protein, 59 aa, Artificial Sequence
  Synthetic
KDVLRKLREVIKEVERIAEEVVRKNKDSADKSRKIIEDVVRALKKVVDDVRKIAEDLSR

SEQ ID NO: 18057 - protein, 61 aa, Artificial Sequence
  Synthetic
DEVEKAVRESEETVKDIRRRNDETVRRLRELAKRLKERNEESVRRLRDLLRRLDEEVARRG

SEQ ID NO: 18058 - protein, 59 aa, Artificial Sequence
  Synthetic
ERVLRDIRRVMEDSERIVKEVLDRNRKVAEDVRRIVEEVLRVNEDVLRKIEKRVRELKK

SEQ ID NO: 18059 - protein, 59 aa, Artificial Sequence
  Synthetic
SELEEIKKRVDRALEENNKLLKEIEERVRKSNRDNERLLKEIEDRVREVTERIKKVEEE

SEQ ID NO: 18060 - protein, 59 aa, Artificial Sequence
  Synthetic
EDVLKKIRDLAREVEENVRESERKIKKLAEDDNRSVAESLREIKRLADEVKRRVDEARK

SEQ ID NO: 18061 - protein, 60 aa, Artificial Sequence
  Synthetic
SELEEVRKRVKDVNRKNKELLDEIERTVRELLEDDRRLVDEAKKELDTLLRDIERLRREG

SEQ ID NO: 18062 - protein, 59 aa, Artificial Sequence
  Synthetic
EDALREIRRLLEEVRKSIEDSKRLIEELLRRLKKVTDESRKKVEDLLREVEREVREAKK

SEQ ID NO: 18063 - protein, 60 aa, Artificial Sequence
  Synthetic
RELEEIEKELKRMLDENRRLLERIEEEVRRLNEDNRRLLEEIEKTVEDLLEKIRKLSKEG

SEQ ID NO: 18064 - protein, 59 aa, Artificial Sequence
  Synthetic
REALKRIEELLREIEEVVKRSKTEIERLLRELEESVRRSDERIERLLKRVKDVVDEEER

SEQ ID NO: 18065 - protein, 60 aa, Artificial Sequence
  Synthetic
EKEKEITKTLEDLIRKNRKLLEEIERRVKEVLKRDRELLEEIERRVADMLRRIRDVLRKG

SEQ ID NO: 18066 - protein, 59 aa, Artificial Sequence
  Synthetic
REVLERIKRLLEKVEKVSTESAKRIEELLEEVKRVTDDSKRRVTELLREVERVVDEVRR

SEQ ID NO: 18067 - protein, 60 aa, Artificial Sequence
  Synthetic
DTLRELAKKAKELDDRNRKLLETVEELVRRVNEKNKDLLRRVRELARELLDRLRKLAREG

SEQ ID NO: 18068 - protein, 59 aa, Artificial Sequence
  Synthetic
EEVRRELERLVRKLEESVRKSRKDVEDLITELKKSVKESLKEIEDLVRRLREVVKEIER

SEQ ID NO: 18069 - protein, 61 aa, Artificial Sequence
  Synthetic
EEVDRILKESEDTIREIRDRVRKMLETSKKTVEEIKRRVDRALERDKKLVEDLRERVERTG

SEQ ID NO: 18070 - protein, 59 aa, Artificial Sequence
  Synthetic
KEAVEKMRRIVRESREVVARIREDIKRVLDESDKVVKDLKRAADRSVEEVKKVVDDIKK

SEQ ID NO: 18071 - protein, 60 aa, Artificial Sequence
  Synthetic
SELERLKETSKDTIKKIKDLLRELKKTVDDVIERDKTLLDDLREKVERVIRRIEELLKRT

SEQ ID NO: 18072 - protein, 59 aa, Artificial Sequence
  Synthetic
EKVRDEIRKLIETNKRVADRVEEEVRKLIEDSERSLRKSEKDVKELIKKVEEVMEEVRR

SEQ ID NO: 18073 - protein, 60 aa, Artificial Sequence
  Synthetic
SIEETVKRLIEEIERVLRDARRESKRLSEEDKKVLDEIREEVRKLEEKIKTVLDKARKDI

SEQ ID NO: 18074 - protein, 59 aa, Artificial Sequence
  Synthetic
EKLLDEVRRRVEEVIKELEELLRRDKERVDRSIRELEKLLEEIKERVDRMIKELEDRLR

SEQ ID NO: 18075 - protein, 60 aa, Artificial Sequence
  Synthetic
REVEEADKTVKELIKRNKELLDRIKKEVDELIRRDKELLDKAERDVDRLIKELRDVAREG

SEQ ID NO: 18076 - protein, 59 aa, Artificial Sequence
  Synthetic
KEVVDEIRRLLRELEKVSEDTKREIRELLKRAEESVRRVTERIERLLKELRDVIREIEK

SEQ ID NO: 18077 - protein, 60 aa, Artificial Sequence
  Synthetic
DELEKIKKDVKKMIRDNEDLLRRVEERVRELNRRNEELLKEIEKRVEELIKRLEDVARRG

SEQ ID NO: 18078 - protein, 59 aa, Artificial Sequence
  Synthetic
REVLEAIRRLEKEARDVSRRSTRKIEELLETSETSSEKSKRRIEELLRRLERVVEEARK

SEQ ID NO: 18079 - protein, 60 aa, Artificial Sequence
  Synthetic
EELERAAERIEELLRSNRDLADKITKLSRETLEKIKDLLRKIEKEVRELLERIKDLERRL

SEQ ID NO: 18080 - protein, 59 aa, Artificial Sequence
  Synthetic
EEVLRELERLLRELKKSVDELSRLIEELLRENKRLIDEVKKRIDELLEELKKLIEKVKK

SEQ ID NO: 18081 - protein, 60 aa, Artificial Sequence
  Synthetic
EIEKVVEEVIRRVRKVLEEVERSVRDTIERIKDVLRRVEEVVRRTDKTIRDVLDRIRKEI

SEQ ID NO: 18082 - protein, 56 aa, Artificial Sequence
  Synthetic
DEDIRRVLEDIRRELKRIVDENRKLAEEIIRTLERMVEKNKELMKEVVKKLEEDSR

SEQ ID NO: 18083 - protein, 60 aa, Artificial Sequence
  Synthetic
RIKETVDKVIEEVRRVLEEVRTTVKRTDERIKEVLEEVEETVRRTLEEIRRVLEELERAI

SEQ ID NO: 18084 - protein, 56 aa, Artificial Sequence
  Synthetic
DEDIRDLVRKIKEELRRIVEKNRELMEKVERELRRIVEENERLARRIKEELDRDMK

SEQ ID NO: 18085 - protein, 60 aa, Artificial Sequence
  Synthetic
RIEEIVERLIREVEKVLRDVERTVDKTDRKIREVLEEVRRISDESIKEVREVLEDLERKI

SEQ ID NO: 18086 - protein, 56 aa, Artificial Sequence
  Synthetic
DEDIRRLAEEIKKKLKRMVERNKELMERIEREIREIVERDKELVERIKRKLRELAR

SEQ ID NO: 18087 - protein, 60 aa, Artificial Sequence
  Synthetic
SIEDVVREVIKRVEDVLRRVEEVSRETIERVRRVLREVEERVERTDERIRRILDKLAKSI

SEQ ID NO: 18088 - protein, 56 aa, Artificial Sequence
  Synthetic
DEDIRRLVKKIEEDLTRIVERDKELLEDIERELRRMVEENERLLEEIERRARDEER

SEQ ID NO: 18089 - protein, 59 aa, Artificial Sequence
  Synthetic
EELERLARDVDKRVEDLKDDIRKIREEVKRLLDDNRRRAEEILEESRKSLETLTDLMRR

SEQ ID NO: 18090 - protein, 56 aa, Artificial Sequence
  Synthetic
SEIVKRVLEKLDEVLKDLKRTIDELKKRLEDVLRESRDIARRALEENERVLDELRK

SEQ ID NO: 18091 - protein, 59 aa, Artificial Sequence
  Synthetic
SEEDRIAEESRESLEKLKDDIRKIEDRVRKLLEDNKRRAEEILREVEEDLKRIEELFKQ

SEQ ID NO: 18092 - protein, 56 aa, Artificial Sequence
  Synthetic
SEIVRRLLEENKRVLDELEKRIEELLRRLDKVLKESERIAREAERKIEEVLRKLEK

SEQ ID NO: 18093 - protein, 60 aa, Artificial Sequence
  Synthetic
SAEEIIDRVTKEAKKSIDRTRDRITKLRRELEESIRRSRDIITKLLEELRRVVEEVKRDK

SEQ ID NO: 18094 - protein, 59 aa, Artificial Sequence
  Synthetic
EKVVEDLERKVEEIVREDEDLVRRLAEEVKRVVEDDERTAKKLEDDVRRIIEAVKRELK

SEQ ID NO: 18095 - protein, 56 aa, Artificial Sequence
  Synthetic
SLEELLEEARKTVERLIRESERVLRESEERVRRLIEELERVVRETRKRVKEVIERV

SEQ ID NO: 18096 - protein, 56 aa, Artificial Sequence
  Synthetic
EEELEKLLREIEERVKEMLKRDEDTLREIERKVKEAVRDSERTLEEIEKRVTEEKT

SEQ ID NO: 18097 - protein, 59 aa, Artificial Sequence
  Synthetic
SITEEIKDIERKVEKLIRELDEENKRILETLEREAKDVLRRIEDINEKLHRRARDLKRK

SEQ ID NO: 18098 - protein, 59 aa, Artificial Sequence
  Synthetic
EELKRVLDRVLKKVEDLLRKLEKSVRDSERRLEELLRELREVVKRVRDNIEKVLEELER

SEQ ID NO: 18099 - protein, 60 aa, Artificial Sequence
  Synthetic
SIREEAREELKRLEEEAERLDRENREILKELTREFKELLKESRDINREIHERIRKLKKDG

SEQ ID NO: 18100 - protein, 59 aa, Artificial Sequence
  Synthetic
RKLDKVLKEIEERLRELLKRLEDSVRESEKRLRDLLRELAKVDEEAKRNVEKVLKELED

SEQ ID NO: 18101 - protein, 59 aa, Artificial Sequence
  Synthetic
SIKDEIRKLLEKVKREVEEIDDRNRRLLEKVKREAEELLEKNRRLLEEVRKRAEELKDS

SEQ ID NO: 18102 - protein, 57 aa, Artificial Sequence
  Synthetic
LERVVRDVERRIEELIRKLERSVDRSEEEVRRLIEELRKSVEDSKREVDRVVEELRR

SEQ ID NO: 18103 - protein, 59 aa, Artificial Sequence
  Synthetic
SILEDVRRLLDEVKKLVEELLRENRRLLEEVKKEVEKLDRKNRELLREVRELVKELKDS

SEQ ID NO: 18104 - protein, 59 aa, Artificial Sequence
  Synthetic
RKLEEAVREVEERVRDLIRKARESVDESRKRIEDLIRELKKSVEESLRDIERLIKELRD

SEQ ID NO: 18105 - protein, 59 aa, Artificial Sequence
  Synthetic
STREDARRLVERVRKEVKRLLKKNSDLLREVTERVKTLNERNRRLLEEVEREAKRLKDS

SEQ ID NO: 18106 - protein, 57 aa, Artificial Sequence
  Synthetic
LERVVREIEKEIRDLIRELEENVKTSEKLIEDLIRELEKSVDESRKRVEELVKELRT

SEQ ID NO: 18107 - protein, 60 aa, Artificial Sequence
  Synthetic
SAEDVVREIEKTVRELMRRVEESVRKVEEDVKRLIKEVKDSADESEKKVERLLEEVKREK

SEQ ID NO: 18108 - protein, 56 aa, Artificial Sequence
  Synthetic
EEELRRLLEEIKKEVDKVIRENEETLKRIKEVVERVIEDNKRTLREIEEEVRRIRK

SEQ ID NO: 18109 - protein, 60 aa, Artificial Sequence
  Synthetic
SVEEVVKRILETIKDLMRRIKKNSEDVLETIKRLADEIRESVKRSNERIRELIKDIRETR

SEQ ID NO: 18110 - protein, 56 aa, Artificial Sequence
  Synthetic
TDELEKLLREVEEIVKDVSRKSDTSLKKAEERVRDVKRKDEKTLRDAEEVVRREKK

SEQ ID NO: 18111 - protein, 59 aa, Artificial Sequence
  Synthetic
SVEDLVRDVRDKAKRTSDEIRKLIERSKEIFERSSREIRRLIEESRDTARRVVEKLKKN

SEQ ID NO: 18112 - protein, 59 aa, Artificial Sequence
  Synthetic
EEEIARLVEEVKRLVKESLELIEELHRRSEKLVRDSLREIKTLNDESRKIVTDVLREVT

SEQ ID NO: 18113 - protein, 59 aa, Artificial Sequence
  Synthetic
KVEELVREVTEIARKVREDLERLVRESERRMRESSEKIKRLIEESRRRMKEVVEELKRE

SEQ ID NO: 18114 - protein, 59 aa, Artificial Sequence
  Synthetic
EEEIKRLREKVKRLVDKVKREIERLNRKSRELVKKSEEDIEKINRESRELLRKVLEDAK

SEQ ID NO: 18115 - protein, 59 aa, Artificial Sequence
  Synthetic
DVEELIKEVKDKAKRTSDEIKKLIDESKRVLDEVVRRLEELVKRIKESADRVLEEIARE

SEQ ID NO: 18116 - protein, 59 aa, Artificial Sequence
  Synthetic
RKIAKKLVDDVERRLRKSLRLIEELNKESRDIVRELLRLIEELLKEVEELVERLLREVK

SEQ ID NO: 18117 - protein, 59 aa, Artificial Sequence
  Synthetic
SELEKVLDEVRKRAKESLRRSEELAKRVEEMDERNLRNSKELRERVEEVIKRLLEVARQ

SEQ ID NO: 18118 - protein, 56 aa, Artificial Sequence
  Synthetic
SRVLEEVERIVKRVLDEDKKVLDRLRRSVERSSRESEKVLDELKKRVDRVLDEVRR

SEQ ID NO: 18119 - protein, 59 aa, Artificial Sequence
  Synthetic
SELEKVFEDVKRRLDESLEKSKELLKRVRDTDRENLKNSKRLLERNKRLVDDLLRVVEA

SEQ ID NO: 18120 - protein, 56 aa, Artificial Sequence
  Synthetic
SRLLEELEKRAKKVLDDDKRVLDEARRSSKRVTDEDRKVLKTAEDINREVSKRIRD

SEQ ID NO: 18121 - protein, 59 aa, Artificial Sequence
  Synthetic
SELEKVVDDVRRRLDRLLETSEKLLEDATKRLKDSERKSDEIVKTNEELLERLKTVLER

SEQ ID NO: 18122 - protein, 56 aa, Artificial Sequence
  Synthetic
SELLKRVEERIKRVLDESKKILKEIADEVRRVLERDKELLKRLEDKNREVSERIRK

SEQ ID NO: 18123 - protein, 59 aa, Artificial Sequence
  Synthetic
SELEKVVKEVADLLRRNLEKSKRVLEEVRRRLEENLRESEKVHDDNRKTARRILELVRE

SEQ ID NO: 18124 - protein, 56 aa, Artificial Sequence
  Synthetic
SRLLEELEERVRESIERSRRFIEELEKIVEETLTESEKLARASSEITKTVLDEIRK

SEQ ID NO: 18125 - protein, 59 aa, Artificial Sequence
  Synthetic
RELEEVFKEVEKELRDNLRKVEEVLREVRERLKENLDRSKEVLKDVRRRIKELLDLARG

SEQ ID NO: 18126 - protein, 56 aa, Artificial Sequence
  Synthetic
SKLLERLERKVEETLRRSREVIEDAKRIVEETLRRSEDIIREAKEIIDDVLEKIRR

SEQ ID NO: 18127 - protein, 60 aa, Artificial Sequence
  Synthetic
STDDALRKIERRHKELTKEVRDMLRKVDEEVKRLIEENEDVLRKLREEVDRVIKDIRRAD

SEQ ID NO: 18128 - protein, 56 aa, Artificial Sequence
  Synthetic
LEDLRRDSERIIEEVKRRLDELRREVEKVIDDVRRLSEKNEKDARRIIEEVKRRLD

SEQ ID NO: 18129 - protein, 60 aa, Artificial Sequence
  Synthetic
STEEVLDEIRKLHKTLTEDIKRVLREIEELHRRTIEENKEVLDKIREDYKRVIDDVRTKD

SEQ ID NO: 18130 - protein, 56 aa, Artificial Sequence
  Synthetic
AEELLRESKEAIKEVKRVLEELRKESKRVVDETRKLSEENLEHSERVLRKVEEDLR

SEQ ID NO: 18131 - protein, 60 aa, Artificial Sequence
  Synthetic
DEDKVLRKVKKLVEDIRREIERILREAERLHKELTRRNEEVLERIRRLVDKVIKEIRKAD

SEQ ID NO: 18132 - protein, 56 aa, Artificial Sequence
  Synthetic
LRELLERVERVIREVRRDLKRLLDESRDVVRRVEERSRRNLEEVKRDIERVKRELD

SEQ ID NO: 18133 - protein, 60 aa, Artificial Sequence
  Synthetic
SKEEVLREIERLHKETIRRIEEVLREATELHKRLTETNKRVLEDLEREAREVIEDVRRAD

SEQ ID NO: 18134 - protein, 56 aa, Artificial Sequence
  Synthetic
ARELLEESRREVERSEKEVERLLRKSRKVVEEVRKLSEENDREVKKILEEVKRRLD

SEQ ID NO: 18135 - protein, 60 aa, Artificial Sequence
  Synthetic
SKEEVLDEMRRLHETTKRDIRRVLKEIEELHERTLRENKRVLEEIKELVRRVIEDIKRKK

SEQ ID NO: 18136 - protein, 56 aa, Artificial Sequence
  Synthetic
LKELLDESRRVVKESKEDLDRLLKESRDVVDDTRRKSEKNLRDAERVIREAEEAVR

SEQ ID NO: 18137 - protein, 60 aa, Artificial Sequence
  Synthetic
DRERVLREMERLVRELLRENREVLDEIRKLHERTVRRNRELAKRLEEEAKEVIDRIEKTK

SEQ ID NO: 18138 - protein, 56 aa, Artificial Sequence
  Synthetic
VKKLLEEARDVIRRAKEKSKRNLDESRRVVKETDDLSEKNREDVRKIIKEVEEELK

SEQ ID NO: 18139 - protein, 60 aa, Artificial Sequence
  Synthetic
DVEEVLREIEELHRRTIERIKKVAKKVREDVKRVLDENKKVLDELRRRVEEVIEKIKKAD

SEQ ID NO: 18140 - protein, 56 aa, Artificial Sequence
  Synthetic
MRELKKRSDDVVRESEKELRRLEDEIRKVIEDLKKLSEDNEREVEKVIRKVEEDLR

SEQ ID NO: 18141 - protein, 60 aa, Artificial Sequence
  Synthetic
DMERIVDTLRKLNTDSNRRSKEAIDRLRKTNKDSLDKVEEVLREAERLAEDVLRKVEEKV

SEQ ID NO: 18142 - protein, 59 aa, Artificial Sequence
  Synthetic
KEVLKKLLEEVKDSNRRSEEDVRRMEEEVKRSNDELLKELKEILDKVREAIKKLEEKVK

SEQ ID NO: 18143 - protein, 60 aa, Artificial Sequence
  Synthetic
SAEDIIRRLRDLNRRSNKKSRDVAEKLRRDNKRTLEKVERKARELKKLAEEVVKEVRDKV

SEQ ID NO: 18144 - protein, 59 aa, Artificial Sequence
  Synthetic
EEVLRRMLKEVEDSNRDSDRDVRRIEEEVRRLNEELDKKLEDLEREVRRMIEEIRRKVK

SEQ ID NO: 18145 - protein, 61 aa, Artificial Sequence
  Synthetic
SELEEVKERVERVLKRIRDLTRELEDRVDKILEKSKRTLDELEKRVREVIARIKELVKRLK

SEQ ID NO: 18146 - protein, 56 aa, Artificial Sequence
  Synthetic
SEVLKRLEELAREVIEEDKRALERLDRKIRRVLDESRDVLRKIRKLIEDVLREVEK

SEQ ID NO: 18147 - protein, 61 aa, Artificial Sequence
  Synthetic
SESETIEKEADEMLKRSKKTLEELRKTVKRILERIEKLTRDLEKTAEDIIRKIEDDLRRLK

SEQ ID NO: 18148 - protein, 56 aa, Artificial Sequence
  Synthetic
SEVAKRISEKIRRVLEDSRRVLEELEDLIRRVLERDKRALERIKEDIDRIIRRVRT

SEQ ID NO: 18149 - protein, 61 aa, Artificial Sequence
  Synthetic
SELEAVLDELRKLVKELEDRLRKVNEESRRLIKELLDRLREVDERSRKLIKDLAEKARRRG

SEQ ID NO: 18150 - protein, 56 aa, Artificial Sequence
  Synthetic
TDELRKRVRDLVRRVDELIKRSKRHAEELTREVEEKVRESEEHVRRLVKEVEDRIR

SEQ ID NO: 18151 - protein, 56 aa, Artificial Sequence
  Synthetic
DEVEEADKRVEDEVRRLKRLVEEHTKRVEDKVRTLKKLVKEHTDEVRRAVEELKRR

SEQ ID NO: 18152 - protein, 55 aa, Artificial Sequence
  Synthetic
EDVLRKVKELLEDVARLVEESHEEARKLLKEVEDRLRESVREVEELLRDVERRTR

SEQ ID NO: 18153 - protein, 59 aa, Artificial Sequence
  Synthetic
DEVEKVKEEIRRIVKELEDRVEEHKKEAKKIIDELRRLVKRHREEVEEIVKKLEELVRR

SEQ ID NO: 18154 - protein, 55 aa, Artificial Sequence
  Synthetic
EEVLKEAEKLLEDVERKLRKSHEDLERLLKEVEEAVRDSNEEVRERLDRVREKMR

SEQ ID NO: 18155 - protein, 59 aa, Artificial Sequence
  Synthetic
DEDRKVEEDIRRIVKRLREIVEKHNREAREIIKRLRDEVRKHRDKARKIVTRLDELIKR

SEQ ID NO: 18156 - protein, 55 aa, Artificial Sequence
  Synthetic
KDVLKEAEELLEKVKRDLDRSHEELEELLKRVREELEDSNRELEKLIEEVERKVR

SEQ ID NO: 18157 - protein, 59 aa, Artificial Sequence
  Synthetic
SEVEDVDDRIRKIIKKLEDLVRKHNEDARRIIDELRELVERHNRRAREIVRELEDLVRR

SEQ ID NO: 18158 - protein, 55 aa, Artificial Sequence
  Synthetic
EEVLKKVEKLLKEVLDLMKESNEELEKLLEEVKREMEESVKELKKLLDEVREKVK

SEQ ID NO: 18159 - protein, 61 aa, Artificial Sequence
  Synthetic
KEIEDVLEKVRKVVTDLKKKLEDVNRESEKLVREVVKELKRVDDESRKLVERVEKEADEKG

SEQ ID NO: 18160 - protein, 56 aa, Artificial Sequence
  Synthetic
EEELDRRIKELKDRADKLIKDSKDNVEELRKKAEELIRRSRKNVEDLVRKATEDVR

SEQ ID NO: 18161 - protein, 61 aa, Artificial Sequence
  Synthetic
RELEEVLKKVEDLHRDVMKKIDDVVREASELHKKVKEDIDEVVKRAEDVLRRVKRELDKRG

SEQ ID NO: 18162 - protein, 56 aa, Artificial Sequence
  Synthetic
KDELDEHIERSLRKVTELVKDLKEHIERSLEEAKELVRRLEELIEELLRRLAEEVR

SEQ ID NO: 18163 - protein, 60 aa, Artificial Sequence
  Synthetic
SEVEEVLREAEELLKEVRDRLRESVEKSKRLLDEVRRKIEESHRRHKELSDEIRRLAEER

SEQ ID NO: 18164 - protein, 56 aa, Artificial Sequence
  Synthetic
IEELRKEIKKKIDEMRRLVKEDTERLERVAEELRRRVEEDKERSKDVVRRLREDVK

SEQ ID NO: 18165 - protein, 60 aa, Artificial Sequence
  Synthetic
SEVEEVLKRAEELLDDVRRLLERSHRETERLLDEVRKRVEDSHREHRKLSDEVRRKAEER

SEQ ID NO: 18166 - protein, 56 aa, Artificial Sequence
  Synthetic
IEELRKDIERAVKELRERVEENTRRVEELVRRLRELVEEDRKRSKEVADEMDERVR

SEQ ID NO: 18167 - protein, 60 aa, Artificial Sequence
  Synthetic
KEVEEVLDTAKKLLDEVRRELERSHEEHKRLSDEIRERLERSHEETERLLKEVKEEVDDK

SEQ ID NO: 18168 - protein, 56 aa, Artificial Sequence
  Synthetic
IEELKRRIDDMVRRLRELVERDRRESKKVADDLRRLVKENTERAREKIEELRKDVE

SEQ ID NO: 18169 - protein, 60 aa, Artificial Sequence
  Synthetic
SEIEEVLKEAEKLLREVEKELRRSHEELKRLLKEVRDKVRRSMEESERLLEEIKKKADER

SEQ ID NO: 18170 - protein, 56 aa, Artificial Sequence
  Synthetic
IEELKRRIEDAARKLEKLVKDDRERIERKVRELERLVEEDKKRLRDRVRKMDEDVR

SEQ ID NO: 18171 - protein, 60 aa, Artificial Sequence
  Synthetic
REVEEIVKKVRKEVTRLLREVEEDMKRNRDTIRELLKYVKKDLEENKDIIRRLLELIRRD

SEQ ID NO: 18172 - protein, 55 aa, Artificial Sequence
  Synthetic
EEARKDIERLLEEVRTKLRENEEDLRRLVKEVDRELKRNRDELERLAKEVRDELK

SEQ ID NO: 18173 - protein, 61 aa, Artificial Sequence
  Synthetic
SEAEEIAKEVEKRIRELLDRVRRMVEESEKYARDSLRKIKRLLDEVRRRIEELLRKIRRDG

SEQ ID NO: 18174 - protein, 55 aa, Artificial Sequence
  Synthetic
SEVAKKVKELLDEVERILREWEKEDRRLLKESEDLLREVEKEVRKLLRRVEEELK

SEQ ID NO: 18175 - protein, 61 aa, Artificial Sequence
  Synthetic
SESEKILEEAKRRIRKLLEDVKEMVKRSRDYARESLKRIKDLVEESKREIDKLLEEIKRSG

SEQ ID NO: 18176 - protein, 55 aa, Artificial Sequence
  Synthetic
SEVEEDLKRLLEEVKRELKRWEEDDKRLLDDSERALKEWEDTDRRLLKRVEDELR

SEQ ID NO: 18177 - protein, 61 aa, Artificial Sequence
  Synthetic
SEVEEIVKDAERYIKESLDRIRKAVEESRRRITELLKEVERLLREVRKRIKELLDEIRRDG

SEQ ID NO: 18178 - protein, 54 aa, Artificial Sequence
  Synthetic
DAERKLEELLEESRELLKRWRDDDKRLVDDVRRKLKEVEEEVRKLLKEVEDELR

SEQ ID NO: 18179 - protein, 61 aa, Artificial Sequence
  Synthetic
SEVEEIVKEAKRRIDELLKKVDELLKESERYARKSLKDNKDMVRRSEERIRELLEKIKRDG

SEQ ID NO: 18180 - protein, 55 aa, Artificial Sequence
  Synthetic
SEAEKRLKDLLDRVKEKLDEVRRRDRELLEESKDLSRRWKERDDRLLEEVEKALK

SEQ ID NO: 18181 - protein, 57 aa, Artificial Sequence
  Synthetic
REIEKIREDLERLLEEVKRAAEEWRRRDEELVRKLEELIKRVLDEDRRLLRELRDKG

SEQ ID NO: 18182 - protein, 59 aa, Artificial Sequence
  Synthetic
REVIKKVLEEIRDKIRKILKTIEDLVRKSEDLIRRVLEEIERILDESRRDVEEVKRREE

SEQ ID NO: 18183 - protein, 56 aa, Artificial Sequence
  Synthetic
DEDRRVKTEIKKLLEELTRRSREVEEDDRRLLDELTRETERIEEDLRRLLEEVRRS

SEQ ID NO: 18184 - protein, 55 aa, Artificial Sequence
  Synthetic
DEIEREVRKVEEDYRRSLRRVLEESRKIAERYKKKLDEMREEVRRRAKKVKDEVR

SEQ ID NO: 18185 - protein, 56 aa, Artificial Sequence
  Synthetic
KSVEKIVEDIKRVADKILEDIKRSEDRVREIVDRHRREIDKVVKEIVKRVEDLKRN

SEQ ID NO: 18186 - protein, 59 aa, Artificial Sequence
  Synthetic
KDEMEDLKRRVDELKKEIERALKEHKDKVKKLLDDLRRLNEELRREVRRVLEEVRETTR

SEQ ID NO: 18187 - protein, 63 aa, Artificial Sequence
  Synthetic
DEIERVEEALKKVEKDLRRLIRELEKLNDKIERDIRRLHEETNKRLKEVREKVEDMIRRVSAR

SEQ ID NO: 18188 - protein, 59 aa, Artificial Sequence
  Synthetic
RRVVKKLLDEIEEILRRLKKLVDDHARESKRILRESERKVEALLEEIEEILKRLEEKVK

SEQ ID NO: 18189 - protein, 60 aa, Artificial Sequence
  Synthetic
DEIERVLREIDELRKKVEKVIEDSRRNAKRWLDRVKRTAEELNKLSDELLEEVTRLAEAG

SEQ ID NO: 18190 - protein, 59 aa, Artificial Sequence
  Synthetic
SRAMEEVRKTAEEVIKTVDKLLKELRKTYEDILRDIDRLLKEHHARNRRVLEEVERLTQ

SEQ ID NO: 18191 - protein, 56 aa, Artificial Sequence
  Synthetic
SEREEVKKRLDDVRREAKRLLDEVRKRLEESHRKHKKLLDEVRKRLKEVEEEAKRR

SEQ ID NO: 18192 - protein, 56 aa, Artificial Sequence
  Synthetic
KEKVTKIIEDLKRELEEMFRKLKRLVEEDDRRSKESLEEVRKLVEDARRKIEEDTR

SEQ ID NO: 18193 - protein, 60 aa, Artificial Sequence
  Synthetic
SSIEKLKKVVEDIKRRSEDLNRELEKVVRDVKKRSEELNEELRKVSEEIERRLRELLKRI

SEQ ID NO: 18194 - protein, 55 aa, Artificial Sequence
  Synthetic
ERFVEELRRALKKDEDDMRRVVEDIERLLEEDERRMKKAVEDHRRLLEELEERAK

SEQ ID NO: 18195 - protein, 56 aa, Artificial Sequence
  Synthetic
DESEELKKVLKEIEDEVRRLIREIERVLEEIERRDRELLKRDEETLKRIEEEVRKL

SEQ ID NO: 18196 - protein, 55 aa, Artificial Sequence
  Synthetic
EEIIEELRRILKEAEDVIRRIIEEVRDVLRESEKRVRESIDENRKILEELRRRAK

SEQ ID NO: 18197 - protein, 56 aa, Artificial Sequence
  Synthetic
DEEDRLRRELEKVRRDADRLLEEIRRVLEEVERRSKELLKRDEDSLREIVRTVTEE

SEQ ID NO: 18198 - protein, 55 aa, Artificial Sequence
  Synthetic
DEVLEEIRRILEELRKEAEDIIRRIRELLRELEKNVTDSIRRNEEMLKELRRKVK

SEQ ID NO: 18199 - protein, 59 aa, Artificial Sequence
  Synthetic
SEAEKILEDMKRYIEEHIERVKRSLEENKKKDRELIEKSRKSLEDARKKIRELLELVRQ

SEQ ID NO: 18200 - protein, 56 aa, Artificial Sequence
  Synthetic
EEILKRIRDLVKELEERDRRVIEEMKKSNKRTEDTDREVLERIRRLVERLADEARK

SEQ ID NO: 18201 - protein, 60 aa, Artificial Sequence
  Synthetic
SELERVIEEIKRLLERLKRENEEVKKRVKKLLDELRKINKDVEDTVRELLKRVKELVDRA

SEQ ID NO: 18202 - protein, 59 aa, Artificial Sequence
  Synthetic
KDEIEEALRRVEEHIKRHLKTVKELAEKAERHIREHLKEVKRMLEKAKRTIDELLKKIK

SEQ ID NO: 18203 - protein, 57 aa, Artificial Sequence
  Synthetic
SLREAAKEVLERVRREVEKLRKSNEEVLTRVREEVKKLLETNKDVLRRVAEILKTAN

SEQ ID NO: 18204 - protein, 55 aa, Artificial Sequence
  Synthetic
EEDIREIEDILRKIAETVETLNRRLEDILREIRKSSKKTIDELREKAKELEDRTR

SEQ ID NO: 18205 - protein, 61 aa, Artificial Sequence
  Synthetic
SEVDEDLKDIKRYLDEHRKRVEEVVKRLEDRSRETAREVEEDVKRIERKVEEAKKEADERG

SEQ ID NO: 18206 - protein, 59 aa, Artificial Sequence
  Synthetic
EDAKRRIEEVLERVRRELERSEEKLRRVLEKHREDNDRLEEELDRVLRELEKILDEVAT

SEQ ID NO: 18207 - protein, 60 aa, Artificial Sequence
  Synthetic
DEVRKILKELKELVKRIEDKLRKYLEDVRREVERIEEEVRRNLERIKRLAEEIERRVRRD

SEQ ID NO: 18208 - protein, 59 aa, Artificial Sequence
  Synthetic
EDVKRKIDKVLDEVRRLLEDIKRRVEKINTDTERLLKKLAEDSKRALEEVKETLERAER

SEQ ID NO: 18209 - protein, 60 aa, Artificial Sequence
  Synthetic
ELRERIKRALDEHRRVSEELERRVREANKRHNEVSKEVKDDLKRSHDELRESLERIKRRG

SEQ ID NO: 18210 - protein, 55 aa, Artificial Sequence
  Synthetic
EEDLKRIREETERLKEDVRRYLRELEKLSRDLRRKVEELLKDNKRKVKEIEDEAK

SEQ ID NO: 18211 - protein, 60 aa, Artificial Sequence
  Synthetic
DELETLEERIRRSVERVRRELKRYKEEMDKHSEDLKRLVDKNLEDVRRELEEIRKLATDG

SEQ ID NO: 18212 - protein, 59 aa, Artificial Sequence
  Synthetic
EDMEKKLRELLERHERENKKAREDVEEANRRNEEVLKDIERRSKKALDDVRRELERVRK

SEQ ID NO: 18213 - protein, 61 aa, Artificial Sequence
  Synthetic
SLKEVLDKIEEDHRRMSKRNEEVLEEVKRRAEKLLKDAEEVLRRVRERIEELIRRVEETKG

SEQ ID NO: 18214 - protein, 56 aa, Artificial Sequence
  Synthetic
VKELKKRADESRKTVERLSRELKKELRKVEEDVKREVEKIEEDLKRIARRVREESR

SEQ ID NO: 18215 - protein, 60 aa, Artificial Sequence
  Synthetic
SELERLLEEVERLLEKLERDNKRLLDDVRRLLERLRRDNERLLEKNKRLLDRLREEVSRV

SEQ ID NO: 18216 - protein, 56 aa, Artificial Sequence
  Synthetic
IEKLAREVKRHIERHKEELDRLRKEVEKNARKHEEDLRRLEERSKKHVEDIERETR

SEQ ID NO: 18217 - protein, 60 aa, Artificial Sequence
  Synthetic
SELEKLLEDVKRLLDELRERNEKVLEDARRLLEELRKRNEDLLRRNRELLERLEREVSKV

SEQ ID NO: 18218 - protein, 56 aa, Artificial Sequence
  Synthetic
IDRVRRRVERHIREHERDLREVKKRIEEDAKRHRDRLKKLEEDSREHVKRMEDRTR

SEQ ID NO: 18219 - protein, 60 aa, Artificial Sequence
  Synthetic
KLEELAKELRRLLEELRKRSKEVIDRLRRLNEELRKTSEEVIRRLRELNRRLTEKARRRL

SEQ ID NO: 18220 - protein, 55 aa, Artificial Sequence
  Synthetic
EEVLRKVREEVKEHERRLEDALRRSKKEIDDHKRELEELLKENAEEVRRVEERIR

SEQ ID NO: 18221 - protein, 60 aa, Artificial Sequence
  Synthetic
KAEELVRELKRLLDKLREESKKVIEELKRRLDEVAKKSEDVVEEMRRLLEELKEKIERRL

SEQ ID NO: 18222 - protein, 55 aa, Artificial Sequence
  Synthetic
EEVLRDVRRKVEDHRRKLDEIRKRVTDEARRHERELEKALEKIRRDIRRIEEELR

SEQ ID NO: 18223 - protein, 60 aa, Artificial Sequence
  Synthetic
KVEDLLREAKALLDELKRESERIIKELRKLNDDLTKKSEEVIRELEKLLRDLKKIVDERL

SEQ ID NO: 18224 - protein, 55 aa, Artificial Sequence
  Synthetic
EEALKKVRKEVEDHKRRLKEAVDRNRKKIKDHEEELERTLRDIRRKIDKERRELE

SEQ ID NO: 18225 - protein, 59 aa, Artificial Sequence
  Synthetic
EELERLLKRVRDESKKNRDKVREDLERSRRKSKRHEDELRRLLKEARDDIDRVRDLRRK

SEQ ID NO: 18226 - protein, 56 aa, Artificial Sequence
  Synthetic
EEVVKEAEKILDDNRKENERVSEEDKELLERNKKKAEDVLRELEELIRKLAEELKK

SEQ ID NO: 18227 - protein, 60 aa, Artificial Sequence
  Synthetic
SELEELLKRIRDKSKENEDEVRTDLKRVRDYARRHEERLRELLERVRDELRKAEELRRAG

SEQ ID NO: 18228 - protein, 56 aa, Artificial Sequence
  Synthetic
ERVLEEIERIMRENKRRNEEVIKEIKELIDRLRRKSERVIEEIKKRIDELRDKARR

SEQ ID NO: 18229 - protein, 61 aa, Artificial Sequence
  Synthetic
EEEREIEERLRKKIEEIRREDKRHHDEVRRKVKEIKEEDREHHERVKRKAEEVKKRIETTG

SEQ ID NO: 18230 - protein, 55 aa, Artificial Sequence
  Synthetic
KDVLRELKRLLDELRESARKNNEDLKRLLEELEESVKRNNDELKKLLDELKERAR

SEQ ID NO: 18231 - protein, 61 aa, Artificial Sequence
  Synthetic
RELEELAERVKRLLERDEELLRRLKDAVRRLSEKDRRLLERLAREVKRLLDELRDLVRKRL

SEQ ID NO: 18232 - protein, 59 aa, Artificial Sequence
  Synthetic
KELLERVITELERKARESEKKHEDSLRELERLARESEERHKRSLEEVERKIEEIKRDLD

SEQ ID NO: 18233 - protein, 60 aa, Artificial Sequence
  Synthetic
RELEKLEDEIRRELRRIEKELKDYERELEERADKDRRDIEDYRRRLEERVKEIEDRLRRD

SEQ ID NO: 18234 - protein, 55 aa, Artificial Sequence
  Synthetic
EELRKILEDALKRVREEVKRILDRNRELLRESEELVRRVLKRNRDLLREVDERVR

SEQ ID NO: 18235 - protein, 61 aa, Artificial Sequence
  Synthetic
DKVREALKRLKDKMETYERRSKKHIEDHKRKLKEYEERVRRNIKRLREELKKLEEDAKTRG

SEQ ID NO: 18236 - protein, 59 aa, Artificial Sequence
  Synthetic
EELLKRVDELARRIMKRIKELNRENERVVRESLKRVDELNKRSEKVHKEVLDRLEELRR

SEQ ID NO: 18237 - protein, 57 aa, Artificial Sequence
  Synthetic
SLKEELEKLVRDIIRDNRRLLEENEELVRRSEESNKRLLEENEETARRIKAELERAG

SEQ ID NO: 18238 - protein, 59 aa, Artificial Sequence
  Synthetic
EKLVEEVKRKLKRKLEEIRREHRRTKEEIKKTNEDIKRRHDETLRRLEKTLEDIKERTR

SEQ ID NO: 18239 - protein, 60 aa, Artificial Sequence
  Synthetic
SEVEKILEELKREVREHERRVEKLVRELEDYVRRHREKVKRIEERLRDKLREIEELVKEG

SEQ ID NO: 18240 - protein, 59 aa, Artificial Sequence
  Synthetic
EKAVREIETLADEIRERIERSLKRIRDLIREIKEDLRRSLERIREIIREIKKAIDDRRK

SEQ ID NO: 18241 - protein, 60 aa, Artificial Sequence
  Synthetic
SEVEKILKEIRDENERLKKEIEEILRELERKLREHRREVEEVLKRIREKIETLKDESRRE

SEQ ID NO: 18242 - protein, 59 aa, Artificial Sequence
  Synthetic
EEMLREMERISREDRETLKRLTDRIREMIRRLEEEIKRSEREAREIIKEAKKVLEDEAT

SEQ ID NO: 18243 - protein, 61 aa, Artificial Sequence
  Synthetic
SRVEELIKDLRRSTKELEDRVRKLLEELKDKTRRTEKRNREKLEKLKEELRKLEEDVKREG

SEQ ID NO: 18244 - protein, 55 aa, Artificial Sequence
  Synthetic
EKVRKVMEDDRRKLKKILDDVEDVLRKHKKVLEDLKRTNDDVLREARKLAEKIRR

SEQ ID NO: 18245 - protein, 60 aa, Artificial Sequence
  Synthetic
SAEERLKEALKRLDDVSKRSEEEIRRMIKRIERISRESLKRLKDLNRRIKELVERIERRL

SEQ ID NO: 18246 - protein, 55 aa, Artificial Sequence
  Synthetic
ERLLEEIKRYIDEHKRRLDELRKDIERYLEEHKERLRELEKRHEELLRTLDREAK

SEQ ID NO: 18247 - protein, 61 aa, Artificial Sequence
  Synthetic
SAEEDLDRMRKKVEDVIREDKERVRKLLERAKEVIRESEKKHEDLRRRIRKVIKEIRERTN

SEQ ID NO: 18248 - protein, 59 aa, Artificial Sequence
  Synthetic
DTDLERELRRIDKHLRDHKDEARKSEERVEDHLRRHRERVRRNEEDVEDKLKKLKDETK

SEQ ID NO: 18249 - protein, 59 aa, Artificial Sequence
  Synthetic
REEEELKRRNKDHNRRHREDTKRIAEDVDRKLREWKKKSDEAREEVKRLLERLKELADR

SEQ ID NO: 18250 - protein, 55 aa, Artificial Sequence
  Synthetic
EDLRRLMKENRETIRESAEILERLRERVEDLVRRDREILEKLLRDIEELAERIKR

SEQ ID NO: 18251 - protein, 60 aa, Artificial Sequence
  Synthetic
SVEDELRKLEERLKRIADELRRLVEKNIEDNKESLKEIEKLIRENIERNKEVLKRIAERG

SEQ ID NO: 18252 - protein, 59 aa, Artificial Sequence
  Synthetic
KDELKKALDDVDKKLEDLRREVEDRDRKNEEDNRRLRKELEERSRENKEFLDKLAREAD

SEQ ID NO: 18253 - protein, 61 aa, Artificial Sequence
  Synthetic
SEKDESARDIEEKLERHLRKSDESRRRNEKRIKEHRDRSDESRKKFETDLKRIEDEVRKRG

SEQ ID NO: 18254 - protein, 55 aa, Artificial Sequence
  Synthetic
EKLKDLERKVREVIDRDRDILRRLEEEHRKVITEDEEILKRLEEKAREAIERIRR

SEQ ID NO: 18255 - protein, 61 aa, Artificial Sequence
  Synthetic
SEKDERLEEIKRRLKEHKRRSEEAVKDNDRKLEKHKRDSDRSAEEVKKKLEEIEKRVRKDG

SEQ ID NO: 18256 - protein, 55 aa, Artificial Sequence
  Synthetic
KKLDDLEREIRKVIEESKRLLEELERRHRRVIEEDKRILDELRRLIEELIEDAKR

SEQ ID NO: 18257 - protein, 61 aa, Artificial Sequence
  Synthetic
SEKDEELKRIKEDLERHERESEDDVRRNEEKIRRHRRKTEEAVKEVEEELKRLEEDVRREG

SEQ ID NO: 18258 - protein, 55 aa, Artificial Sequence
  Synthetic
RDLERLRKEIREVIEKSKDLLRELRRRHEKVIEDSEDILRKLEKKIKDLVDKIRK

SEQ ID NO: 18259 - protein, 61 aa, Artificial Sequence
  Synthetic
SRKDEEVKRVKEKLKKHEERSRDMVRKVEDKSRRHREKIKEAEREVRRRIEELEEDVRRRG

SEQ ID NO: 18260 - protein, 55 aa, Artificial Sequence
  Synthetic
KKLEDLREEAERVIRRSEKLLEELREHVERNIDEVREILRELAELVKRVIDEIRR

SEQ ID NO: 18261 - protein, 60 aa, Artificial Sequence
  Synthetic
SVEDILRTLRRLLEELEEESERILKRLREIIETNVRRVKELLRRLKERLDELAERLKAKV

SEQ ID NO: 18262 - protein, 59 aa, Artificial Sequence
  Synthetic
SKELDDLLKKVEEHLRRHKRKLEKALKDVEDESREHEKELRRALKRIERLLRELERKAD

SEQ ID NO: 18263 - protein, 60 aa, Artificial Sequence
  Synthetic
DEEEVIREIEKRFRDLIRRAEDVLRRIAEKMKRLKDKTRRLLEELRESNRKLIKELRDRI

SEQ ID NO: 18264 - protein, 56 aa, Artificial Sequence
  Synthetic
SKEVRDRVEEELKRIEDRLRKLDTDVDRYLKEHEDRLRKLKEDNERDLKRVEERAR

SEQ ID NO: 18265 - protein, 56 aa, Artificial Sequence
  Synthetic
DIEELLKEVKKEVDRVEKKVKELIDRNKERVDRVREENERVADEVRKLIKELRDRI

SEQ ID NO: 18266 - protein, 59 aa, Artificial Sequence
  Synthetic
RELVEKVAREAREKLKKVEDLLRKISRRSEELLRRNREATKKILKELRELLRRVEEKRR

SEQ ID NO: 18267 - protein, 59 aa, Artificial Sequence
  Synthetic
SEAEEALKRHRKLNKEAEKRAKDATDDSKRLLDEIRKRAKEASEDSKRLLDEARRLREA

SEQ ID NO: 18268 - protein, 60 aa, Artificial Sequence
  Synthetic
KERVRRILEEAKKTARELRERIKKLLKENEDAAKKLRDEIDEAAKKNKKAADEAREEARR

SEQ ID NO: 18269 - protein, 59 aa, Artificial Sequence
  Synthetic
SELEKVLEEHRRLNDEIRKELEDVTRKSEETNKRIEEDLRRVTKEAKDLLERIKEKLEA

SEQ ID NO: 18270 - protein, 60 aa, Artificial Sequence
  Synthetic
RRRVEEILRDMKETVDKLKKEIEKLLEENKESAKELRERIKENLETNRDLVRKLEEDIKR

SEQ ID NO: 18271 - protein, 59 aa, Artificial Sequence
  Synthetic
DEAEKALEEVRDLIREIRERDRKVTEDVERLNREIREKLKEVTERVKRSNDDIRRLLEE

SEQ ID NO: 18272 - protein, 56 aa, Artificial Sequence
  Synthetic
KSILEELERLVRELRKESEKSLEDLERLNKKLEDEVRDILRKLNKLNEDLLRKVEE

SEQ ID NO: 18273 - protein, 59 aa, Artificial Sequence
  Synthetic
SEMDEARKEVKKLLDEVRKRDEDVTRKVEELNKRIEERAKRVAEEVEKLIREILKRLRD

SEQ ID NO: 18274 - protein, 56 aa, Artificial Sequence
  Synthetic
EKILEDLRRLVKKLKEESDRSLERLERLNERLERRIREILKRLEKLVRELRKEVER

SEQ ID NO: 18275 - protein, 59 aa, Artificial Sequence
  Synthetic
SEAEEALRKVEELIRRVKKRDDEAVKEVRELNKRIADILREVLETVRKLLEDVEKALRD

SEQ ID NO: 18276 - protein, 56 aa, Artificial Sequence
  Synthetic
EDILRTLRELVRDLERKSEESLKELNRLNEDLKREVKRVLDELEELVRRLKKKVDD

SEQ ID NO: 18277 - protein, 57 aa, Artificial Sequence
  Synthetic
QVEDVIRESKKLTEDSEKRVRDIIRRLKKTIKDSEDRVRRMVEELRERIKRLRERLE

SEQ ID NO: 18278 - protein, 60 aa, Artificial Sequence
  Synthetic
SDEVIETLLRKDRDLNRRVNEELRKLEEEVEELNRRVNETIKEILRRIAELIRRILEKTK

SEQ ID NO: 18279 - protein, 56 aa, Artificial Sequence
  Synthetic
KVEEILKELEELIKRSKETVDEVIKRSKDLVDESRRRIEDVIRELEKLIRELDKKL

SEQ ID NO: 18280 - protein, 60 aa, Artificial Sequence
  Synthetic
SEEVVRTLVKEIRDLNKRVNEEIKRLLDEDKKLNEEVNRLIKELKKEIEDLIREVLEDKR

SEQ ID NO: 18281 - protein, 57 aa, Artificial Sequence
  Synthetic
EVEDIIRESKKLIEDSKERVKEVIKESKRLIEELERTVREVIKELRERVDRLRKKLR

SEQ ID NO: 18282 - protein, 60 aa, Artificial Sequence
  Synthetic
SKEVLDTLLKEDRDLNEDVKRRITELLEEDRRLIEEVKKRIRELRERIKRVIEEVDRATT

SEQ ID NO: 18283 - protein, 57 aa, Artificial Sequence
  Synthetic
STAEEIVRRIRDVNRRINEAIERLLEEDEKVIRDVERRIEEVLERDRRVIEEVKRRV

SEQ ID NO: 18284 - protein, 56 aa, Artificial Sequence
  Synthetic
ERIIEEIKRILKESEDRLRRILETSRERLKELKKKLERVLEDSKKKLDELRRELRK

SEQ ID NO: 18285 - protein, 57 aa, Artificial Sequence
  Synthetic
REAEDLVRKVREVNKKANRDIKELLDRDEKVIREVARAAEAIVDEARRIVEEVERKI

SEQ ID NO: 18286 - protein, 56 aa, Artificial Sequence
  Synthetic
ERIIKEIKETLDESRKRAEEVLEKSRRLLEELRKRVEEIVKRIKELIDELERRVRK

SEQ ID NO: 18287 - protein, 59 aa, Artificial Sequence
  Synthetic
SAEEIIKTLEELVEKLKRDAEETLRKIEELVRRLEEEARKSSEKIRKLVEDLAKEARER

SEQ ID NO: 18288 - protein, 59 aa, Artificial Sequence
  Synthetic
DEVLTEVLKEITELVKRLKELSDRTLEEVRKLVERVKRESKRTLEEAEEVVRELKERLR

SEQ ID NO: 18289 - protein, 59 aa, Artificial Sequence
  Synthetic
DAERLLREVEELVRRLEEEMEKTDREIKELIKRLEERLRTTSREIKKLIEDLEREARER

SEQ ID NO: 18290 - protein, 59 aa, Artificial Sequence
  Synthetic
REVLKKVIDEIRKLVKRVKDESKRSLDEIRKLAEEVDRRSKKVLDEIRRLVDEVRERLR

SEQ ID NO: 18291 - protein, 59 aa, Artificial Sequence
  Synthetic
DAEDILREIKKLADDLKREADKSLKEIEELARRLEEEAERSLREIEELARRLKKRADEK

SEQ ID NO: 18292 - protein, 59 aa, Artificial Sequence
  Synthetic
REALKRAAERARELADRARKLSEDTLRKAKKLADDARKLSRETLEKARELAERAERRLT

SEQ ID NO: 18293 - protein, 59 aa, Artificial Sequence
  Synthetic
DEAEEVRERVKKLIEESKRLIEEVRRRVRTISERSAELIEEVERRVDKMARDVERLLKD

SEQ ID NO: 18294 - protein, 56 aa, Artificial Sequence
  Synthetic
DEVLRRLEKLVRDSNDEIRRVLKELKEVVKKNRDEIERVLKEARKKVEDLLREIER

SEQ ID NO: 18295 - protein, 59 aa, Artificial Sequence
  Synthetic
SEVERVRRENEETIRRIDEVIKKIEEDNKRTIDEIRDVIRRVKETVEKTNREIEKVRRD

SEQ ID NO: 18296 - protein, 56 aa, Artificial Sequence
  Synthetic
DEALRELRKSNEDLERRIRKVLEDLKRSNDELLEEIDRVLKRLHKSDEDVRKRVTD

SEQ ID NO: 18297 - protein, 59 aa, Artificial Sequence
  Synthetic
RELEEAEKTVEELIRRIKEIIDEVLKRDRDVSERSKELIDKVKREAEKIVEEIERLLKN

SEQ ID NO: 18298 - protein, 56 aa, Artificial Sequence
  Synthetic
SEVLRKLDKKVKDLKREIDDVVRESKELIKRNRRRVEEVAKELERLIKEVKDRIDT

SEQ ID NO: 18299 - protein, 59 aa, Artificial Sequence
  Synthetic
DELERVREEVRRLIKEIEEIIERVERRDEEVSRKSEDLIRRVLKRDEELAKEIEDLKRN

SEQ ID NO: 18300 - protein, 56 aa, Artificial Sequence
  Synthetic
SRVLEELKRLVEELEREIRRVFEKSKKLIDDNRKKADDVVKRSEDLLREVKKEIDR

SEQ ID NO: 18301 - protein, 60 aa, Artificial Sequence
  Synthetic
SESEEVERLVEDVSRRNTKAVRDIEEHSKDVSRRNKKLVREVEEHTREVIERAKELTKRR

SEQ ID NO: 18302 - protein, 56 aa, Artificial Sequence
  Synthetic
RDVVERIRRLLRENVEENKKVLKRSDDLLKKNERENREVVKKSEKDARDLVEEIKT

SEQ ID NO: 18303 - protein, 60 aa, Artificial Sequence
  Synthetic
SEEEDVRRKVEKVSRENKDMVRRILEHSRKVSEDNRRLVKEILDRARKAIEDVKELIERL

SEQ ID NO: 18304 - protein, 56 aa, Artificial Sequence
  Synthetic
RDVVREIKELLDRNREENRKVLEDSERLVDENEKDNKRVLDELRRLLKRAEEEARR

SEQ ID NO: 18305 - protein, 60 aa, Artificial Sequence
  Synthetic
SIDKALRDLKEILDRNRKHSEDLLREAEELVERSNDHSRRVLEEIRKLLRELEEEIRKRV

SEQ ID NO: 18306 - protein, 59 aa, Artificial Sequence
  Synthetic
EKLVREVEKTVEDLSRENKKLNEDVKRTVDELIKKSEKLNEDAKRTIDELLKRVKERIE

SEQ ID NO: 18307 - protein, 60 aa, Artificial Sequence
  Synthetic
SVEDLLRKLKTIVDENRERVKKSLEELRRILDENRRRVERSLRELRESNERLRKEIEDTV

SEQ ID NO: 18308 - protein, 59 aa, Artificial Sequence
  Synthetic
EEVLKKVEETVKRLSDENRELNKRIKEEVDEMSKRNKELNKRIKEENDKLIKEVKDEIR

SEQ ID NO: 18309 - protein, 60 aa, Artificial Sequence
  Synthetic
SVEDVLRELKELIDRNREEAKKTEKELRELIKRNDDEAEKVAKESKKLTEDLEKEAREKV

SEQ ID NO: 18310 - protein, 59 aa, Artificial Sequence
  Synthetic
EKVLREAKERAKEISKRNKDVNEEARKRIKEISDKDKRILDEVRRESKEIEKRLKEALK

SEQ ID NO: 18311 - protein, 60 aa, Artificial Sequence
  Synthetic
DDEERVREVVKRVKEDNERVDREIREIVKRLLEHDRELLEEIKKEVDRVAEELRKLKEDG

SEQ ID NO: 18312 - protein, 56 aa, Artificial Sequence
  Synthetic
SEVLERLRKTLEELEKRNEELLEEARRLLEESREEVRELLERAKKILEDLEREIRR

SEQ ID NO: 18313 - protein, 60 aa, Artificial Sequence
  Synthetic
SREERVREVVKRMLERDEELLRRIREEVERALRRNDEVLREIERVVEEMEERVERLKREG

SEQ ID NO: 18314 - protein, 56 aa, Artificial Sequence
  Synthetic
DEVLEDLRRLLEESVRRVEDLLKKLTDIVRESRKRVRDILRKAKRIVDKLREEIKK

SEQ ID NO: 18315 - protein, 60 aa, Artificial Sequence
  Synthetic
DVEREAKRLLEEVAEHVRRSIKELRKLLEDVARHVEKTLRELEKLTDDVRKRVEKLKRDV

SEQ ID NO: 18316 - protein, 56 aa, Artificial Sequence
  Synthetic
RKVVEDIREKVKDLKRKHDTVLEEIKKEVRRLEKEHKEVLDKSNEDARKLEEDLRR

SEQ ID NO: 18317 - protein, 59 aa, Artificial Sequence
  Synthetic
SEREEAKKLLRENEEDNRRVDREVEKLTEENERINRRVNEEVRKLTEDIKRKVESVKRL

SEQ ID NO: 18318 - protein, 56 aa, Artificial Sequence
  Synthetic
RDIVEDIRRKADRLRERNEETLKRDEDKLKKLEESNRKVLKEDEDELRRLADKLRK

SEQ ID NO: 18319 - protein, 60 aa, Artificial Sequence
  Synthetic
SEAEEAAKRSRDTAKRAEEIAREAAERLKKNAEDAERIAREAKKTSKKTAKEAEDAARSN

SEQ ID NO: 18320 - protein, 55 aa, Artificial Sequence
  Synthetic
DELRELAKRTEDKARKLADELRKLADETEKKARKLAEEVKKLADDTRRKAEEARR

SEQ ID NO: 18321 - protein, 59 aa, Artificial Sequence
  Synthetic
DEVEKAKEESRRTLKKIEDRVRKVAEDLKKNLEDIERRVREVLEELRRLLEEIEEVVRR

SEQ ID NO: 18322 - protein, 55 aa, Artificial Sequence
  Synthetic
EELERLVEKTEDKIRKLLEEIKELLKETEKKIRKLLKRIEELMKEIEDKIDEDKK

SEQ ID NO: 18323 - protein, 59 aa, Artificial Sequence
  Synthetic
DEVERVKEELKRNLKEIREDVERVKEESRDTVRKATEIVKRVLEELKKSLEEIKKLVDD

SEQ ID NO: 18324 - protein, 55 aa, Artificial Sequence
  Synthetic
EELRDTLRKSAEDIERLLREIEDLVRKTTEDAKRLADEVRRLVKESERTIKERAD

SEQ ID NO: 18325 - protein, 59 aa, Artificial Sequence
  Synthetic
SEVEKVDRELKDNLRRIEEEVRKVDEELRRLLEEIRRTVEEFKERSKRTVEEIEKVARE

SEQ ID NO: 18326 - protein, 55 aa, Artificial Sequence
  Synthetic
EELRRTLEESERRIRKLLEDLKRLLEEIEKDIRRLEEEVDKLVRDTEKRIDDLRR

SEQ ID NO: 18327 - protein, 60 aa, Artificial Sequence
  Synthetic
SLEDELRRRITEAEKRIRDLLRRVRELVERSKKTIKDLLRKLEETARETKDEIRKLEEEV

SEQ ID NO: 18328 - protein, 59 aa, Artificial Sequence
  Synthetic
EEKVRRVEREIKEILKKIEEDVTRLLEENKKILKEVEDLVRELEKEDRDVLKKVRDDVK

SEQ ID NO: 18329 - protein, 60 aa, Artificial Sequence
  Synthetic
DLRERLEEEIERARRDIEDLLRKAEELAKRSKDDIKRLMDEVRRLVEKTRRDIEKLLREV

SEQ ID NO: 18330 - protein, 59 aa, Artificial Sequence
  Synthetic
EEKVRKVEEEIRRVLEKIRRDARKLLEENKRITDEVRKRVKELLEENRKVLKRIKDEVD

SEQ ID NO: 18331 - protein, 60 aa, Artificial Sequence
  Synthetic
KLREELEKLAEEAKKRIEDLAREAREAAKRASESNKDLARRLRELAKRTEDEIKRLLDDA

SEQ ID NO: 18332 - protein, 59 aa, Artificial Sequence
  Synthetic
EEAARKAAEEIKKILEEAERLAREALKELERSNEESERLARRAAEEDKRVADEARERAR

SEQ ID NO: 18333 - protein, 60 aa, Artificial Sequence
  Synthetic
SLREELRKKIEEAKKRIEKLMDDVRKEAEKAKRSNEELLRRLRKLAKETKRRIEELLERV

SEQ ID NO: 18334 - protein, 59 aa, Artificial Sequence
  Synthetic
EEKVRRLLKEIEEILRRIEDKVRKLLKELRDSNRDSKRLVDELMRRDKEVLRRIEEEVK

SEQ ID NO: 18335 - protein, 60 aa, Artificial Sequence
  Synthetic
DLERELEELIKKAEKKIRDLRKEVEDVVRDASRSNKELLREAEKLAEETRKRIDDLRKEV

SEQ ID NO: 18336 - protein, 59 aa, Artificial Sequence
  Synthetic
EEKVRELEKRIRDVLRRIEEEVRRLLKRLKDSNDDSRRRLEELLRRDKKVLEDIERETK

SEQ ID NO: 18337 - protein, 60 aa, Artificial Sequence
  Synthetic
SLREELERLIKEAEEKIRRLLKEVKDLVRELSRTNKKLLKEVRDLAKRTKERIKRLLDEL

SEQ ID NO: 18338 - protein, 59 aa, Artificial Sequence
  Synthetic
EDKVRKLLEDIERLLREIERLVRELLEELKDSNRRSEELVRRLLKEDKDVLEKAERDVR

SEQ ID NO: 18339 - protein, 57 aa, Artificial Sequence
  Synthetic
DEEEELRRLVRRLMEEVKRLLEENKKLADELRKTVKKLLEDNEDLARRLREEVERKV

SEQ ID NO: 18340 - protein, 56 aa, Artificial Sequence
  Synthetic
VEEVKKELEELLREVEELSRRSLKELKELLERVKKRSEESLKELEDLLREAERKSR

SEQ ID NO: 18341 - protein, 57 aa, Artificial Sequence
  Synthetic
SEKEELKKEVDRLAEEVERLLRENEKRARDLERKIRKLLEENRRAADEVRKEVDRTV

SEQ ID NO: 18342 - protein, 56 aa, Artificial Sequence
  Synthetic
VEEVKKRLEDLLEEVKELSKRSEDTLRKLAEDVKRLAEDSNKKLEDLLEEAKERAR

SEQ ID NO: 18343 - protein, 57 aa, Artificial Sequence
  Synthetic
SEKEELRDLVRRAKEDVDRLRRENEELNRRIEEDIERLLKENEDRNREVKDDIDKRV

SEQ ID NO: 18344 - protein, 56 aa, Artificial Sequence
  Synthetic
VEEVKKELEELLRRVRKLSEDSLKHLRELLKEVRELSERSLRHLDELLRRVREKAR

SEQ ID NO: 18345 - protein, 57 aa, Artificial Sequence
  Synthetic
KDEEDAERRARESDKSIEELRERNEREAKRLKEEVEKLLEENEKKVDELRKRVEKTV

SEQ ID NO: 18346 - protein, 56 aa, Artificial Sequence
  Synthetic
MEEVKEELDRLNKEAEELSRRSLRKLEELLREARRLSRESKERLKKLLEDARRKSN

SEQ ID NO: 18347 - protein, 57 aa, Artificial Sequence
  Synthetic
SDEERAREEARRSKESIERLLEENRRLAKELKKEIRRLLKENEDLVRKLKEDVDREV

SEQ ID NO: 18348 - protein, 56 aa, Artificial Sequence
  Synthetic
IEEVLEELDRLNKEVEELSRRSLKRLEELLEEVRKLSEDSLRKLKELLDRVREKSR

SEQ ID NO: 18349 - protein, 60 aa, Artificial Sequence
  Synthetic
DERERLRKALEEVRRTVEKLVRENEELLKKVEERVRRLNDEDRRLVEEIKRRADELRKRG

SEQ ID NO: 18350 - protein, 59 aa, Artificial Sequence
  Synthetic
DEVIRRVEDELRKVLEDIKRLSDKNKRDLEEALRDIERLVKENNKRLKEALDDLERAAT

SEQ ID NO: 18351 - protein, 59 aa, Artificial Sequence
  Synthetic
SEREDLKRELDEVRKDVARLNEEDRRLLEDARRDLEKLVRDNEELVERVKKTLKELEDR

SEQ ID NO: 18352 - protein, 59 aa, Artificial Sequence
  Synthetic
DEVIRRVRDRLRRVDEELKELVKRNNERLREVLERIRKLSRDNSERLKAALEKIKEEVR

SEQ ID NO: 18353 - protein, 60 aa, Artificial Sequence
  Synthetic
SLKEKIEKLLEESRKDIEELNERDKKRVKESEDTVRRLNEEDEELVKRVREELEKLRKEG

SEQ ID NO: 18354 - protein, 59 aa, Artificial Sequence
  Synthetic
EEVIKEVEKRLRDVTKTSREKVRENNRRLEEMTEDTKRLVEENNKDLDKALKDIRKKAE

SEQ ID NO: 18355 - protein, 60 aa, Artificial Sequence
  Synthetic
KEREELEKLLEEVERDVARLNKEDKDLVDEIRRRVDELVKRDKELLDRVRDRLRELSERG

SEQ ID NO: 18356 - protein, 59 aa, Artificial Sequence
  Synthetic
SRVIEKVKRDLRRVLEELRRLAEENNRRLDKALKELEDLVRKNNKKVEDALRKIEEEVR

SEQ ID NO: 18357 - protein, 60 aa, Artificial Sequence
  Synthetic
ELAEDLRRLLKEVEDRSRDLLRKNRKLLEEVRERTERLIKELEDLLEEITRRVKDLIRKI

SEQ ID NO: 18358 - protein, 59 aa, Artificial Sequence
  Synthetic
EELVRRVKEEIKRLMEEDKKLNKKSVEEIRELLKRDRDLIEEVKKEAERLLKEIEDEVR

SEQ ID NO: 18359 - protein, 60 aa, Artificial Sequence
  Synthetic
DLERELEKLLDEVRRRVEELNKRNEDLARKVAEDTKELLKELRELLEEVKRRVRDLIRKI

SEQ ID NO: 18360 - protein, 59 aa, Artificial Sequence
  Synthetic
REVAERVKEEIRRLLKEIEELNKRSEERIKKLLEDDRRLIERVKERIEDLLRRIEERTR

SEQ ID NO: 18361 - protein, 57 aa, Artificial Sequence
  Synthetic
DEVDELLKRLEDSSRKAEEDVKRMLERLEDSTRDAARRVKEMIKRNEEVSDEAEKRI

SEQ ID NO: 18362 - protein, 59 aa, Artificial Sequence
  Synthetic
DKVVKEIDDLLRESERRNRELLREIEELLKESERINRELLKEVDKVLRDSEERVERRRE

SEQ ID NO: 18363 - protein, 60 aa, Artificial Sequence
  Synthetic
DLERRLDKILRDIEEAARDNIRRNEELLKRSEENVRRNLEENKKKLEEIKREVEELERRV

SEQ ID NO: 18364 - protein, 59 aa, Artificial Sequence
  Synthetic
EELAKRAEERLRELLKELHEISKKMLREIKRVNDEINKVSKESLDELDELVKEIKERTR

SEQ ID NO: 18365 - protein, 60 aa, Artificial Sequence
  Synthetic
SLEEELRKMLEKVERDVRRNIERNKRLLDRSRENVKENIKKNRELLKEIEKDVRKLETDV

SEQ ID NO: 18366 - protein, 59 aa, Artificial Sequence
  Synthetic
EKLAEDAKRRLEELVREIHKISEDALEEIKRVNKEINDVSKEMLDRLRELLKEIKERTR

SEQ ID NO: 18367 - protein, 60 aa, Artificial Sequence
  Synthetic
SLEEELEKLLDEVRKEVKKNIDENKRLLDKSREEVRKNIKTNEDLLRRIEEKVRRLLEEV

SEQ ID NO: 18368 - protein, 59 aa, Artificial Sequence
  Synthetic
EELAERAKRELKKLEEEIHRISREALERSKKTVEELHEISKRMLDELKRVDKRLEDETR

SEQ ID NO: 18369 - protein, 60 aa, Artificial Sequence
  Synthetic
DQREDLDRRLREIEERVEENLRTNEELLKEVEKNAKENIDRNRKTLEDIKRRVDDLRRRV

SEQ ID NO: 18370 - protein, 59 aa, Artificial Sequence
  Synthetic
DELVERVKDELRKLVKEIHDVSKKALEDLERLLRELNEISERALRTLEKLLRKLEEDTR

SEQ ID NO: 18371 - protein, 60 aa, Artificial Sequence
  Synthetic
SLEETLKRILDKVREEAKRNIKENEDLMRESRRNVEENIRRNEKTLEDIEEEVRRLREEV

SEQ ID NO: 18372 - protein, 59 aa, Artificial Sequence
  Synthetic
EELAKRVKEELDKIVRRVHEISRRALEESRKTVEELNRESEKVLRELERLLRRLEEEVR

SEQ ID NO: 18373 - protein, 60 aa, Artificial Sequence
  Synthetic
SDEDDLRRILEEIRRNVERNIRENERLLDEIKKRVDENIKTNKKTLEDIREEVRKLEEEV

SEQ ID NO: 18374 - protein, 59 aa, Artificial Sequence
  Synthetic
RELVKRVEDTLRDLLRKLNEISKRALEELKRAVERIHRISRDALRELDRLRKELEERTR

SEQ ID NO: 18375 - protein, 60 aa, Artificial Sequence
  Synthetic
DDEERLDKILRDIEENARRNIERNRTLLERSRENVKRNIDENRRKLEEIRRDVEDLKRKV

SEQ ID NO: 18376 - protein, 59 aa, Artificial Sequence
  Synthetic
KELVKRAEDELRRLLKELNEISERMLRRSEETVRRLNEVSERALRELDRLRKKIERRTR

SEQ ID NO: 18377 - protein, 60 aa, Artificial Sequence
  Synthetic
SLEETIRRILEESERNVKRNIDENRKLLKEIRDNAKRNIDENRRLLEEIERTVRDLERRV

SEQ ID NO: 18378 - protein, 59 aa, Artificial Sequence
  Synthetic
EKLAEDVLRELDKANKDINEISKKMLEDLKKAVEDVNRVSKEMLERLKRLREEIEKRTR

SEQ ID NO: 18379 - protein, 60 aa, Artificial Sequence
  Synthetic
KDEERLDEILDRSRRNAETNIKRNKDLLDESRENVKENIKKNEDLARRIRERVEDLERKV

SEQ ID NO: 18380 - protein, 59 aa, Artificial Sequence
  Synthetic
EELVKRVEDELRRLNEEVNKISEEMLKRSKDTVRELNKVSEDALRKLDELRERIERRTT

SEQ ID NO: 18381 - protein, 60 aa, Artificial Sequence
  Synthetic
SLEEDLRRILKEIRDNVRENIRTNEELLKRSRENVKENIERNKKLLREIEEEVRRLEREV

SEQ ID NO: 18382 - protein, 59 aa, Artificial Sequence
  Synthetic
EKLAKEVKDRLRDLLRKLNKISEDALRELKRLNDEINRISEEALERLKKLLEDLERRVR

SEQ ID NO: 18383 - protein, 60 aa, Artificial Sequence
  Synthetic
SLEEKLRKILEESRENVERNIRRNEDILRKSRRNVEENIKTLEKILEDIKRTVDKLKKDV

SEQ ID NO: 18384 - protein, 59 aa, Artificial Sequence
  Synthetic
EELARKVERELREMNKELNRISEEALKRIEEVNRDINRVSKEVIEELERLVEKIREDVR

SEQ ID NO: 18385 - protein, 60 aa, Artificial Sequence
  Synthetic
DLERELRKAAKESRENAEKNKEDNKEAAKRSKENAEKNIRDNEETARKIEEDARKLEKDA

SEQ ID NO: 18386 - protein, 59 aa, Artificial Sequence
  Synthetic
EDLARKALRDLREANKRANEISKKALDEIRKANEDANRASKKANDDLRRLAEKAKRDAE

SEQ ID NO: 18387 - protein, 60 aa, Artificial Sequence
  Synthetic
DLERELRELLERVRKDVRDNLETNKKLLEESRKNAEDNLRENDRLLKELEKRVKDLLDEL

SEQ ID NO: 18388 - protein, 59 aa, Artificial Sequence
  Synthetic
EEVVKRVLDDIKRIVDEINRISKEMLDKLKRINDEANKISKRMLDELRRIAEEIEREVR

SEQ ID NO: 18389 - protein, 60 aa, Artificial Sequence
  Synthetic
DLEERIKKLLEESRKNVEDNEKKNKDSLRRSREEVKRLSDENEKLLKRIRERAEKLKTDL

SEQ ID NO: 18390 - protein, 59 aa, Artificial Sequence
  Synthetic
KRVVETVLRELERINEEINDISRKMLKENEKILRDIKKINEDMLKRLKEALERVDREVN

SEQ ID NO: 18391 - protein, 60 aa, Artificial Sequence
  Synthetic
SLEEEIRDILRRAEERVKELTKENERSLRESKKRVEDLSRENEKTLEEIKRDVDRLLKEL

SEQ ID NO: 18392 - protein, 59 aa, Artificial Sequence
  Synthetic
EDVVREMLKDLERIVREISEDNARTLEENERILREIEEENKKTLERLREILKRIREEVT

SEQ ID NO: 18393 - protein, 60 aa, Artificial Sequence
  Synthetic
SLEEEIRKILKRIREEVKRLTEENDKTLKDSERNVRENLTEIERILREAADDVRRLEEEL

SEQ ID NO: 18394 - protein, 59 aa, Artificial Sequence
  Synthetic
EEVVERVLRELERLLEEIRDRNKKTLDDLRRINEEVNRISKDALEELRRLLRELRELVK

SEQ ID NO: 18395 - protein, 60 aa, Artificial Sequence
  Synthetic
SLEDEIRKILDELRKNVRENLEDNKRVLREAEEEAKKLSEDNRRLLKELKERVKELKDRL

SEQ ID NO: 18396 - protein, 59 aa, Artificial Sequence
  Synthetic
EEVVRRALEEIERINRDINRRSKEVLDELREIVREAKEDNERTLRKLKKILEEIEEKVR

SEQ ID NO: 18397 - protein, 60 aa, Artificial Sequence
  Synthetic
RLKEELERILREAEKNVRENLRRNRESLKESKETVDRLSEENKKTLEEVRTTVEELLKEL

SEQ ID NO: 18398 - protein, 59 aa, Artificial Sequence
  Synthetic
EEVVRDALRKLEEINRRINEISERMLKENKRLLEEIKRINKETLDRLKELLEEIKEDVR

SEQ ID NO: 18399 - protein, 59 aa, Artificial Sequence
  Synthetic
SDVERVEKELKKTNDELRKIVDEARKLLEKTNKEIRDINRTMMEELRRTNEDLKRVVER

SEQ ID NO: 18400 - protein, 59 aa, Artificial Sequence
  Synthetic
RRVIERIREIARKNEEDVKKLLKELKDLLEKNKRDVEKASEENKKLLEDNERDVRREST

SEQ ID NO: 18401 - protein, 59 aa, Artificial Sequence
  Synthetic
KEAEEAAKLLEDTNRRLKEIAEEAEELLRRTNEKAKKINDESREKIKDAARRAEDAARR

SEQ ID NO: 18402 - protein, 59 aa, Artificial Sequence
  Synthetic
EKAIREIKELAKKNKEDAERALERIKRLADKNREDAKRADEDNERAAEEARRKAEELKR

SEQ ID NO: 18403 - protein, 59 aa, Artificial Sequence
  Synthetic
DEAEDVERKLEATNKELNEINERSRKELETSNRELNRINTESEEEIRRIEERIDRVKKR

SEQ ID NO: 18404 - protein, 59 aa, Artificial Sequence
  Synthetic
KELIERIKRLLDKNREDVKRMNEDNKRLLKENRDDVKRMDEKNKKILDEVDEKAKEKEK

SEQ ID NO: 18405 - protein, 60 aa, Artificial Sequence
  Synthetic
SEEEELKKLLDRVRERVERSLDEIRRLAREVEEHVKKVNDDIRRLLDEIRREVEDIERRV

SEQ ID NO: 18406 - protein, 55 aa, Artificial Sequence
  Synthetic
DEVRELVRTLEERIDDSTREVKKLIEDLKRENKRILDTVRDLVRRLREKIKRIAD

SEQ ID NO: 18407 - protein, 60 aa, Artificial Sequence
  Synthetic
DEEERLAELLERVKRDVDRSLKRIRDLLKELEKHAKEVNDDIRRLLEEVERRVREMEKRV

SEQ ID NO: 18408 - protein, 55 aa, Artificial Sequence
  Synthetic
REVEELIRRMLKRIRDSTKKVEDELRRILEENRRILEEVRREIDELKKAIDEISR

SEQ ID NO: 18409 - protein, 60 aa, Artificial Sequence
  Synthetic
SEEERLEELLRRIEKHSRELIRELEKSLEDSEREVRKSLKRIEELLRRAERKVREIRKRV

SEQ ID NO: 18410 - protein, 55 aa, Artificial Sequence
  Synthetic
REVKKVLDDLLKRDRDAIDEARKLNEEMLKRIEDSSREVEKLLADMEKTIEDIEK

SEQ ID NO: 18411 - protein, 60 aa, Artificial Sequence
  Synthetic
SIDDKARKDLKRILDENRDIVRRVEELIRRSDELLKRILDDVKRRIDELRKKLEDIARKV

SEQ ID NO: 18412 - protein, 59 aa, Artificial Sequence
  Synthetic
EDVLRDIDRLLKEIKKHAEDSLRKIEKLLRESEEKVKDILRKIKKLLDEARKEVEDRRR

SEQ ID NO: 18413 - protein, 60 aa, Artificial Sequence
  Synthetic
SIAEEVEELIRRLETKNRKIVKDVEDAIRASDDKNRRVLDKVRKDVERLKRELDRIAKEV

SEQ ID NO: 18414 - protein, 59 aa, Artificial Sequence
  Synthetic
KEVLDRIKELLKKLEKHVKDSLDKIDDLLRKSEKHVRESLETIKRLLEELEREVERLAR

SEQ ID NO: 18415 - protein, 60 aa, Artificial Sequence
  Synthetic
DEKREVERLIRELIEENRDIVRRVEKLVRESNKKLDEILEEIRERLERLREKLKDIKRRV

SEQ ID NO: 18416 - protein, 59 aa, Artificial Sequence
  Synthetic
EEVLRRIRELLERVEKHVRDSLRRIDELLKRSEERVRRIIREVRERLKRLEEEVREAKR

SEQ ID NO: 18417 - protein, 60 aa, Artificial Sequence
  Synthetic
SISEDAERLVRELLRKNKEIRDRVEELVRRSNDKNRRVLEEVEKRLRDIIRKLEDIERRV

SEQ ID NO: 18418 - protein, 59 aa, Artificial Sequence
  Synthetic
EEVLRRIRDLLRRVTEHVEKSKRDIEKLLRESRDHVRRSKEKIKRLLDEARERVERSKK

SEQ ID NO: 18419 - protein, 60 aa, Artificial Sequence
  Synthetic
DEEDKLRKLLEEAREAVKRALERVDKLLRDSEREVRRILEEVKKLLDESRKAVEDIRRKA

SEQ ID NO: 18420 - protein, 56 aa, Artificial Sequence
  Synthetic
SEEAEELIRRVIRKAEKLLREVEELLRRSNDKLRKLTEKVRTDLERSKKRLEDEAR

SEQ ID NO: 18421 - protein, 60 aa, Artificial Sequence
  Synthetic
SILEKVRELLERIRDTVRKILREIEKSLEDNKRHSDEVLKEIEDLLRDLERRVKEIEERI

SEQ ID NO: 18422 - protein, 59 aa, Artificial Sequence
  Synthetic
EEILEEIERLIREVRRRLKKILDDVRELSRRANEKDRKSLEEVRKLVEDVRRELERVAT

SEQ ID NO: 18423 - protein, 60 aa, Artificial Sequence
  Synthetic
DVEEEVKKLLEDLERHSRKVLEEIKKLLKELEDHNRKTVEDIEELLRELEKEVRKLEEDV

SEQ ID NO: 18424 - protein, 59 aa, Artificial Sequence
  Synthetic
EEILEEIRRLAEELEKEDRKTLKEARDLAREVKKRNEEIKRRVEELIKKVDRELKEVAR

SEQ ID NO: 18425 - protein, 60 aa, Artificial Sequence
  Synthetic
DEDEDVRRLLRRLREKVRRVKKKIDDSLRENRKKVRKTNEEVKKLLEDNRRRIEDVKRKR

SEQ ID NO: 18426 - protein, 56 aa, Artificial Sequence
  Synthetic
SEEARKLMRELEKELKEIEDEVDKMSEEINRKNDEILRRARELIKRNNELLEEIRR

SEQ ID NO: 18427 - protein, 60 aa, Artificial Sequence
  Synthetic
SEEEEVRKLLERLERTVEKTNRDVERSLRENEKRVRETNDEVRRLLEENRRRIEDVERKL

SEQ ID NO: 18428 - protein, 56 aa, Artificial Sequence
  Synthetic
SEEAKRLIEELEKRNREVKKEVEEMSRRINKKNEEILREARKLIEENNKLLKDIER

SEQ ID NO: 18429 - protein, 60 aa, Artificial Sequence
  Synthetic
SELDEIAKAIRRLLEEVRRKNERIDEDIRRLLDELREHSEKVLREIEELLRRLEDAVRKR

SEQ ID NO: 18430 - protein, 59 aa, Artificial Sequence
  Synthetic
KDARKRAKDVLRDLEKKVEDLKRRNDKTLTDAKRELDDSRRRVKRVLDELEKVLRDLKR

SEQ ID NO: 18431 - protein, 60 aa, Artificial Sequence
  Synthetic
DEAERILEEVKKLLEEVERLNKKIDDEARRLLREVERENEEIDRDIKRLLDEVRKDVERN

SEQ ID NO: 18432 - protein, 59 aa, Artificial Sequence
  Synthetic
EEVRRRAEEVLRELEKVVEDSRRRNEKTLRDMERRIKELEDRNRDTLRKLREVVKELER

SEQ ID NO: 18433 - protein, 55 aa, Artificial Sequence
  Synthetic
SEEERVRELIERMREMLERLEESNKKVLEEIERVLEKSERDVERVIREIERTLEE

SEQ ID NO: 18434 - protein, 56 aa, Artificial Sequence
  Synthetic
TDRVIREAERVLEEVRRRNEKVNKEARDLLKEVEKHSRDVLEDIKRLLEEIRERAR

SEQ ID NO: 18435 - protein, 56 aa, Artificial Sequence
  Synthetic
SEKERIEDVIRRIEKVLKESRDEADRVKKEIEKRLRELEKRHKEVTTEVKRVAEEV

SEQ ID NO: 18436 - protein, 56 aa, Artificial Sequence
  Synthetic
SETVLREAEELLRRVKKHSKEVLDRVRELLKRVEEKSERVLRELERVLREIREKAR

SEQ ID NO: 18437 - protein, 55 aa, Artificial Sequence
  Synthetic
KDEERIEELLRRNEENLRRLEDSNRKVLRENEEILKELKRRHEKITEDLKRELEK

SEQ ID NO: 18438 - protein, 56 aa, Artificial Sequence
  Synthetic
TDTVLREATELSKEVHKENRRVNEEAKDLSRRVAEESDRILRELKKLLDEIRKRAK

SEQ ID NO: 18439 - protein, 55 aa, Artificial Sequence
  Synthetic
SDEERIRRVIEDIERKLRELEKRHKEVTRENKENAKELKERHDRVTKDIKKTLDD

SEQ ID NO: 18440 - protein, 56 aa, Artificial Sequence
  Synthetic
TDRVLEEIKKLLREVEERSDRALREAKKLSKRVHERSKEVIDRLRELLREIKREAD

SEQ ID NO: 18441 - protein, 59 aa, Artificial Sequence
  Synthetic
DSAREMERRIRELLKRVEDKSEKALRDSKKLTKEVEEESERALRRTEKLLREVAELARR

SEQ ID NO: 18442 - protein, 56 aa, Artificial Sequence
  Synthetic
EKRVRDVLREIEEVLRRLEERHERLTRDDERVLRELEDRHRKLSERVKKLLEELKK

SEQ ID NO: 18443 - protein, 59 aa, Artificial Sequence
  Synthetic
DRAEKAEREIRRLLERVKEDSERVLRESEELTRRVEEESRKILEETKKLTRTLEELSRT

SEQ ID NO: 18444 - protein, 56 aa, Artificial Sequence
  Synthetic
EERVKRVLEEIERLLRELEERHKRLTERDKEVVKRLADRHREVSEEDRRVLEELKR

SEQ ID NO: 18445 - protein, 59 aa, Artificial Sequence
  Synthetic
DEMEEVIRRIETLLKRVVDESDKVLEDIKRLLDRVVEESEKALETTRKLLEEVAELART

SEQ ID NO: 18446 - protein, 56 aa, Artificial Sequence
  Synthetic
EDEVRRVLERVKKVLDELAERHKELSKEIKRELRRLEKEHEDLSEEVKRLLRELER

SEQ ID NO: 18447 - protein, 59 aa, Artificial Sequence
  Synthetic
DEMREAEEEIKRLLDTVKTESDRVLEEARKLTRRVEEESERVLRETKKLTDELRKLSRK

SEQ ID NO: 18448 - protein, 56 aa, Artificial Sequence
  Synthetic
EERVRRVLKEIREVLDRLEKRHKKVSKDDKEVLERLEKEHKRLSREDEEVLRELER

SEQ ID NO: 18449 - protein, 59 aa, Artificial Sequence
  Synthetic
SRMEKVEREIRTLLKEVEERSRKVLDESRKLTEDVERISRDALKKIKELLEEVRDLART

SEQ ID NO: 18450 - protein, 56 aa, Artificial Sequence
  Synthetic
EKDVRRVLREIEELLKDLERKHKELTRRDEEVLKKLEDDHRRVSEEIEEVLRRLEK

SEQ ID NO: 18451 - protein, 59 aa, Artificial Sequence
  Synthetic
SRAERVKEEIKKLLEEVRKESKRVLKEVKDLTKEVDDKSKKVMRDIRELLKEVEELART

SEQ ID NO: 18452 - protein, 56 aa, Artificial Sequence
  Synthetic
AEEVKKVLREIEETLRKLEEEHRRLSDRDREKLDELAKRHKKVSRDIEEKLKELER

SEQ ID NO: 18453 - protein, 57 aa, Artificial Sequence
  Synthetic
KEVEDVLDKVKKALEEIRERNKRVNDEIRRLLDEVRRRNEDADREIEEILKRVADEV

SEQ ID NO: 18454 - protein, 59 aa, Artificial Sequence
  Synthetic
EELRERIKAVVEEVERVMDELRRSNEKVVREVEDVMRRLEERNRRTLERIEEVLERLKR

SEQ ID NO: 18455 - protein, 61 aa, Artificial Sequence
  Synthetic
EEVERLLTKVRELVRRIEEENKKANDDSRKSLKEIKDRVEKALDDSRKSLEEIEKIVRRDN

SEQ ID NO: 18456 - protein, 59 aa, Artificial Sequence
  Synthetic
EELKRRIETVIKEVRETIEELKKSNEESVRDSERTIRELEEEIKRTVRESEKEIKRLED

SEQ ID NO: 18457 - protein, 59 aa, Artificial Sequence
  Synthetic
EEVERMADEVRRLNEEVRRRNEESIEEVKRLNDEIRKTNEKSIEDVKELLKRVKEVRER

SEQ ID NO: 18458 - protein, 58 aa, Artificial Sequence
  Synthetic
DAREKMKRLVEENTKSVEELKKRNEETSRRNTKSVREVTRRNEKTSDDVRRLVREEEQ

SEQ ID NO: 18459 - protein, 59 aa, Artificial Sequence
  Synthetic
DEVEEAKEKVRRLNKELRRVVKEVEDEVRRLNEEVRREVEKVRDDVRKLRETIREVKAR

SEQ ID NO: 18460 - protein, 58 aa, Artificial Sequence
  Synthetic
SLEREIEKISRENTKSLRDLLDRLRRLVEENTKSVEELVRRLEELLERVEEEMRRLET

SEQ ID NO: 18461 - protein, 60 aa, Artificial Sequence
  Synthetic
SRVETMVKDIRRLLEEVKERVERALRDNERVLEDIRRRVDELLKTNEKINRDIERRVRRG

SEQ ID NO: 18462 - protein, 55 aa, Artificial Sequence
  Synthetic
EEIKEVLRRVEEEAERLKREIEESLKRSEDLVRKLKERIKRSLEESRKRIKKLED

SEQ ID NO: 18463 - protein, 59 aa, Artificial Sequence
  Synthetic
SEVEEAVKRIRKIVKEIEERVRRLLEENRRVIEEVERINKEMLKRNKEINKEVEELVRR

SEQ ID NO: 18464 - protein, 55 aa, Artificial Sequence
  Synthetic
KEIEDILRRAEETVEDLKRRIRRSLEDSRRVVEELAEENRKSLRESKKKVDELKK

SEQ ID NO: 18465 - protein, 59 aa, Artificial Sequence
  Synthetic
SRVEDFVRRIRDLLRKIEEIARKALKENKDVLREIKRINDEMLRRNEEILKRAEDLVRE

SEQ ID NO: 18466 - protein, 55 aa, Artificial Sequence
  Synthetic
EEIKRILEEAKKTIDELRKEIEKSLREVEKAIRELEERNRRSLERSEDLVRELKR

SEQ ID NO: 18467 - protein, 59 aa, Artificial Sequence
  Synthetic
RRVEEAVKRIKEILERVTRRVEKVLRDNKRVLDDIRRINEEMLKRNKEINRKVEELVRE

SEQ ID NO: 18468 - protein, 55 aa, Artificial Sequence
  Synthetic
EKIKEILEEVRRTIEELKERIRKSLEEVKELIKRMDEENRKSLEESDERARRAEK

SEQ ID NO: 18469 - protein, 59 aa, Artificial Sequence
  Synthetic
SELEEIRERVKRVEEELRKNLKDAERRVREAKRRSEESLKDIEKKVKEVRDELKELARR

SEQ ID NO: 18470 - protein, 58 aa, Artificial Sequence
  Synthetic
SAREDIKRLLKELEELLKRSEDEARRLLKEVRDLVDTTKKRIDKLLKEIEDLLREIER

SEQ ID NO: 18471 - protein, 60 aa, Artificial Sequence
  Synthetic
KIEEKVEKLVRELLKELETVDREVNERVKRSNEKLEKIDRDVNKLVEDSNRKLKEISDRV

SEQ ID NO: 18472 - protein, 55 aa, Artificial Sequence
  Synthetic
EKIKRLLEEVKKLVEDSERNIRELLKESRKKVEDSKRNLDRLLKESDDRVDRERR

SEQ ID NO: 18473 - protein, 60 aa, Artificial Sequence
  Synthetic
ETEKEVEELVKRVLDKDKRISDESEERIRRLMEKNKKILEDVKRLVDEVREKLEDIRRRV

SEQ ID NO: 18474 - protein, 55 aa, Artificial Sequence
  Synthetic
EKIKKLLEDVRRLIKRSKEKNDELLEELKRLSEETRETLDRLLKDLEDKIREAKK

SEQ ID NO: 18475 - protein, 59 aa, Artificial Sequence
  Synthetic
DEKEDVDRLLRELEELVERSERSIRKLLEDNRKLAEDLKRTVEKLLEDNRRKVEEVRRT

SEQ ID NO: 18476 - protein, 56 aa, Artificial Sequence
  Synthetic
SEELRKLIKRVLKKLRDLNRRVKELSRRSAEELKRLLDEVRKLSEDSLRELDKLRK

SEQ ID NO: 18477 - protein, 59 aa, Artificial Sequence
  Synthetic
DEEKRVRDLLEEVREEVERSDKSIEELLRELEKAVKDSERTIRKLLEDNERMVREVRRK

SEQ ID NO: 18478 - protein, 56 aa, Artificial Sequence
  Synthetic
SKEAEDLIREILEELKRLNEDVKRLIREVLETLKELNERVKKLVKESNDELRELAR

SEQ ID NO: 18479 - protein, 59 aa, Artificial Sequence
  Synthetic
REEEKLDKLRKDLEKRVEESKRSIDKLLEDNRRRVEESKKTIEKLLEDNKRRVDEIKKR

SEQ ID NO: 18480 - protein, 56 aa, Artificial Sequence
  Synthetic
SDEAEKLIRDVKKELDRLNEEVKKLSEDSLKELDDLNREVKELMERSNRKLDEDAK

SEQ ID NO: 18481 - protein, 59 aa, Artificial Sequence
  Synthetic
KEVEDVLREIKKLIKEIHEKSKRALDETRELLERIHRTTRRVLEEIRRLLKEVEELAKA

SEQ ID NO: 18482 - protein, 56 aa, Artificial Sequence
  Synthetic
KDRVEDLVRELERVVKEDKDRSKESEERIKKLVEDDTREAEKLIRELEKILEDTEK

SEQ ID NO: 18483 - protein, 59 aa, Artificial Sequence
  Synthetic
SEVEEVLRDIDRLAKEIHKRSRDVLRDIDRLLKEIHERSRRMLERIKRLLDEVRRLVEA

SEQ ID NO: 18484 - protein, 56 aa, Artificial Sequence
  Synthetic
RDRLRELVERLERLLETDKREIEKLIKKLEEMLEEDERRARELLEDIRRILEEIKK

SEQ ID NO: 18485 - protein, 59 aa, Artificial Sequence
  Synthetic
SEVEEVTKEIKRLVEEIHKRSREALEETRRLVETIHRDSKRVLDEIERLLEEVRKLAED

SEQ ID NO: 18486 - protein, 56 aa, Artificial Sequence
  Synthetic
EKRVRDLLEKLREDAKRDEDASRKSEEDIRKVVEEDKREAEKLLKRIEDELRKTEK

SEQ ID NO: 18487 - protein, 59 aa, Artificial Sequence
  Synthetic
SEVEKVLKDIRDLVKKIHDESKRVLDEIEELVRRINKRSRDALREIRELLRTVTELAKA

SEQ ID NO: 18488 - protein, 56 aa, Artificial Sequence
  Synthetic
KDRVRKLVEDLERMLRRDEAEAEKLIKKLRELLEKDRDDIRRLLEDIKRILDEIRK

SEQ ID NO: 18489 - protein, 59 aa, Artificial Sequence
  Synthetic
EEVERALDRARRLLERIHETSRDVLRRTEELLRRINEESRRVLKEAKELLDRVEKLVRD

SEQ ID NO: 18490 - protein, 56 aa, Artificial Sequence
  Synthetic
KDRVEKLERELEKVVREDEEESKKSIRRAEEMLRKDREDIRRLLEEIKKILEDIDK

SEQ ID NO: 18491 - protein, 59 aa, Artificial Sequence
  Synthetic
SEVEDVLRKAEELAKRIHDRSRKALKETEELLERINRDSERVLRESEKLLEDVRRLAEA

SEQ ID NO: 18492 - protein, 56 aa, Artificial Sequence
  Synthetic
EKTVRRLVDKLRRLVEEDTDESRKSEERIKKMVEDDKRESEKSLKRIKDIMKEITD

SEQ ID NO: 18493 - protein, 57 aa, Artificial Sequence
  Synthetic
SEVERVLEENERTLKRIEETAKKVLEEIEKLSKEVEDRAREVLDRVRRISEEVRRDV

SEQ ID NO: 18494 - protein, 59 aa, Artificial Sequence
  Synthetic
EEMRDRVRKLIKRNDEVLDRVRREIEKLHRRNKKILDDLRREIERLNRENKRLLDELRK

SEQ ID NO: 18495 - protein, 57 aa, Artificial Sequence
  Synthetic
SEVEEVLKRNEKTLKEIEERAREVEETVRELSERIRKRNEEVNRELEERSKRIRRDV

SEQ ID NO: 18496 - protein, 59 aa, Artificial Sequence
  Synthetic
KEARDRADELLKRNREVLERLRKRIEDLHRDNKRVLDELRRSNEETNRRNRKLLEELRK

SEQ ID NO: 18497 - protein, 57 aa, Artificial Sequence
  Synthetic
REVEEVLKENEKTLREIERRMEEVLKRVEDLSDEVRRRVDEVLRRVEETSKEIAKRV

SEQ ID NO: 18498 - protein, 59 aa, Artificial Sequence
  Synthetic
EEARKRAKDVLDRNRDVLRRLKDAIDKLNKRNKEILDRLRRKIEDLNRRNEELLRRLEK

SEQ ID NO: 18499 - protein, 57 aa, Artificial Sequence
  Synthetic
REVEEVLDKNRKTLREIRKRAKEVLDRVEELSRRVREENERVNRELRKISEEIARKV

SEQ ID NO: 18500 - protein, 59 aa, Artificial Sequence
  Synthetic
EEMKKEADKLLKENRDVLRELERRIEELNERNRRVLKELEESNRRTNEENKRLLDELRR

SEQ ID NO: 18501 - protein, 57 aa, Artificial Sequence
  Synthetic
DEVETVLDENRRTLKRIRERVDKVLKDVEKLSREVEDEIRRVLEEVEKELKDIERDV

SEQ ID NO: 18502 - protein, 59 aa, Artificial Sequence
  Synthetic
EDAREKAKRLLEENKRVLKELEERVKRLNDKNRRILERIKKRIEDLRRRVKELLKKLRK

SEQ ID NO: 18503 - protein, 57 aa, Artificial Sequence
  Synthetic
DEVERVLEENERTLRRVREIIREVLEEVRRLSEEVKRRIDEVLKENEDTLKKIKDEV

SEQ ID NO: 18504 - protein, 59 aa, Artificial Sequence
  Synthetic
KKARDRVREVEKRNRDVLEEVKDEIRKVNKDNRDILRRIKKDVEELLKRNEKVLRETEK

SEQ ID NO: 18505 - protein, 57 aa, Artificial Sequence
  Synthetic
RELEELLKRNERTLRELAKRVKRLLEENKETVRRIEERLRRVLTEVEKISRDIRDRV

SEQ ID NO: 18506 - protein, 59 aa, Artificial Sequence
  Synthetic
EEVRERVKKVEDENRKLLERAEREIKKVAEENRRLMEKMKDDVRKANKRNKELLERRTK

SEQ ID NO: 18507 - protein, 57 aa, Artificial Sequence
  Synthetic
SEVEKVLRENEKTLREIEREIDRVLRDNERTLKEVRERNEEVNRRVEEDSKRVKDEV

SEQ ID NO: 18508 - protein, 59 aa, Artificial Sequence
  Synthetic
EKARERIKRILDENRKVLREIERKIREVLERNKKVLEEVRKSNEETNDRNRKLLEELRR

SEQ ID NO: 18509 - protein, 60 aa, Artificial Sequence
  Synthetic
SVDERVEDLRRDVERVLRELRKSNEESIRRSEEIVTRLEEELKRNSKEVEEVLKRLEDEL

SEQ ID NO: 18510 - protein, 59 aa, Artificial Sequence
  Synthetic
SKDLEKALRDVEKLIREIRERNKEMLRRSEEILKEIEKRARDMSRESKRLIEDIERRTK

SEQ ID NO: 18511 - protein, 60 aa, Artificial Sequence
  Synthetic
SVEEKVDRLKRRVEEVLKELKKSNEDNTREVREALKRLKKAIEESIDRSRKILEDLRRKL

SEQ ID NO: 18512 - protein, 59 aa, Artificial Sequence
  Synthetic
DEDLERALKEVEELIRRIREENKEMSERSKKIIRKIEKDVKKALDDSERVLREIAERTK

SEQ ID NO: 18513 - protein, 60 aa, Artificial Sequence
  Synthetic
DVEKKVKELLDEVRDALRRLRKSNKDNTDEVDRALRELEETNKKSIEDSRRIVEDLKRKL

SEQ ID NO: 18514 - protein, 59 aa, Artificial Sequence
  Synthetic
DREADKVLKRVKEEIERIERENRRMSEKSERLIREIRKRNKEMLDRSKKLLEDIKRRVT

SEQ ID NO: 18515 - protein, 60 aa, Artificial Sequence
  Synthetic
KEVEEILTESEDMNRKIDKLVKEILDESEEMNRRIRELVKRIVEELRELLREIRRLAEER

SEQ ID NO: 18516 - protein, 59 aa, Artificial Sequence
  Synthetic
EEVRDRLRRSHEKNKEVLDRIRKRVKESHEKNEKSLREIEETVKKLERDVERLLREIKR

SEQ ID NO: 18517 - protein, 60 aa, Artificial Sequence
  Synthetic
EEVERILKESRDANERIKKLVEDILRRSKELNERIRDEVRKILAKSEEVNRRIRRLAKER

SEQ ID NO: 18518 - protein, 59 aa, Artificial Sequence
  Synthetic
EEVKEKAKESHKENKKVLDRIKRELEKSHEENKKSLDEIRDRVRRSHEKNRKVLEEIRK

SEQ ID NO: 18519 - protein, 60 aa, Artificial Sequence
  Synthetic
EEVERILKESEDMNRRIRDLVRRIAEESDKVNREIRKLVDEIRRKLDRVLREIEDLIRKR

SEQ ID NO: 18520 - protein, 59 aa, Artificial Sequence
  Synthetic
EEVKKRAEKSHRENEKSLREIRKELEELHRKNKKSLEEIRKTLRKLEEKVRKLLEDLRR

SEQ ID NO: 18521 - protein, 60 aa, Artificial Sequence
  Synthetic
SRVEEILRESKRMNDEIREKVKKILKTSRDMNKRIEDRVREILKKSEDLNRKIRKLIDDR

SEQ ID NO: 18522 - protein, 59 aa, Artificial Sequence
  Synthetic
EEAKRELEKSHKTNEKVLRDIERRVEDSNRENEDSLRKIERAVTESHRRNEEVLERLER

SEQ ID NO: 18523 - protein, 60 aa, Artificial Sequence
  Synthetic
EEVERILEESKRLNDEIRRKVDEILRKSEEINERVRRLVEKIRTDLERVLEEIRDLADKR

SEQ ID NO: 18524 - protein, 59 aa, Artificial Sequence
  Synthetic
EEVKRRLEESHKDNDRVLKEIERRVRESLRRNRESLRRIDEKVKELERRVEKLLREIKK

SEQ ID NO: 18525 - protein, 60 aa, Artificial Sequence
  Synthetic
EEVERILDESKKMNDDIRRKVKEILDESEKLNEDIRRLVKEILEKSKRVNDRIRKLAKDR

SEQ ID NO: 18526 - protein, 59 aa, Artificial Sequence
  Synthetic
DEVRRRAEKSVRENDKSLKEIEDEVRRSVEKNEESLKRIEDEVRKSHEKNKKVLDEIKK

SEQ ID NO: 18527 - protein, 61 aa, Artificial Sequence
  Synthetic
SKAEEVLKEIRERIERIRKRAEDVLRHDEESLKRAEEVNRKMEKESRRINEEIRDRVRKEG

SEQ ID NO: 18528 - protein, 56 aa, Artificial Sequence
  Synthetic
EKDVRKVEDDIRRVIKKLKEELDRSADKSRDVVRRLRDSNKKLNDKNRRDIEEIKK

SEQ ID NO: 18529 - protein, 61 aa, Artificial Sequence
  Synthetic
DSEEEVRERIRKIIEDVKRIIEEVLRRDDKILKEIEKRNRDMLKRSKEINKEARDRVREAG

SEQ ID NO: 18530 - protein, 56 aa, Artificial Sequence
  Synthetic
DRSVRELERRIKEVIDELRELVERSKRKVDKLLKDLTRSNEKVNRENREDLERLEK

SEQ ID NO: 18531 - protein, 59 aa, Artificial Sequence
  Synthetic
DDERRAKKAAEDAAKRLKEIAEKAHRISEKALEELKRINDDANKISEDALRRLEKLKKE

SEQ ID NO: 18532 - protein, 56 aa, Artificial Sequence
  Synthetic
SEEAKELAKKIKEIADEARKRAEDNARTNKEAAERSKENADRNAEENKKAAEKAKR

SEQ ID NO: 18533 - protein, 59 aa, Artificial Sequence
  Synthetic
KDEDEVRRRVEELLKRNKELVEEIHKLSEDALRDLERINEEVNRISDEMRRRLDKLKKD

SEQ ID NO: 18534 - protein, 56 aa, Artificial Sequence
  Synthetic
SEEAKKLKERVDRSLKESEKEVRENLERNRKLLDESRRNAEENLRENKRVLDELRR

SEQ ID NO: 18535 - protein, 59 aa, Artificial Sequence
  Synthetic
SEEDEVRERVKRVLDELRKINEDLNRISREMLERNKDILRRIHEISKRALDKLKKLKED

SEQ ID NO: 18536 - protein, 56 aa, Artificial Sequence
  Synthetic
SEEVRKLLEEVKDSLRKSEENARRNLDENRRSLKKSEDEVRRNLEENEDTLRKLEK

SEQ ID NO: 18537 - protein, 59 aa, Artificial Sequence
  Synthetic
DEMDEVRRTIKKLDKDSRDKVRTVEEKIRRLDEESRRENEEIVRKIEELLEEIERRVRS

SEQ ID NO: 18538 - protein, 56 aa, Artificial Sequence
  Synthetic
EKEVKKIKEESDESLKEIEKLLREIEEESKRSLREMEKTLEDIERRVRRVLEEIKR

SEQ ID NO: 18539 - protein, 60 aa, Artificial Sequence
  Synthetic
SIEELAKRNEEENEKAAEDVERLAEEVKERAERVARESEKLAREAEKEAERVAREIRRDR

SEQ ID NO: 18540 - protein, 59 aa, Artificial Sequence
  Synthetic
EEAAKRASEENRKAVRDAREKARRAAEEAKKLLDEARKHSEEAAKRAKELLEEAKKRAD

SEQ ID NO: 18541 - protein, 60 aa, Artificial Sequence
  Synthetic
KIEELMKRNEKENREVLERVKELADRNRRENEEVVKKSKKELDDLKRKIEEVLERIKRER

SEQ ID NO: 18542 - protein, 59 aa, Artificial Sequence
  Synthetic
EEVVEKVSRENKKLVADIEDEVRRASTRNKKLVKDIEKHSEDVVRELEKLLKDIKDKVD

SEQ ID NO: 18543 - protein, 60 aa, Artificial Sequence
  Synthetic
SIEDEARRNEKRNREVLKRSKDLLDEIARKIEEVEKRIRDLVKRVKEEIDEVLRRIKRER

SEQ ID NO: 18544 - protein, 59 aa, Artificial Sequence
  Synthetic
DELLRRVSKENEDLVREIEDHTRRVLETIERKLRRVEEKVETVVREIKRRLEDIERRVK

SEQ ID NO: 18545 - protein, 59 aa, Artificial Sequence
  Synthetic
EEVDRVIERIKRLLEEVERKIRRASEKNRRLIEKSRKELEKVSKENKDLIDRVRELRDA

SEQ ID NO: 18546 - protein, 55 aa, Artificial Sequence
  Synthetic
EKVKTVEKEIREVIERADEIIERNERENKKSVEEIEEILERNKRRNEEALREVDK

SEQ ID NO: 18547 - protein, 57 aa, Artificial Sequence
  Synthetic
DELDRAIEEVKRLLDEIRRRLEKVVREVRKLNEEIREDLRRVVEEVRRTNKEIRDRV

SEQ ID NO: 18548 - protein, 56 aa, Artificial Sequence
  Synthetic
SDKVRRLEREVEELLKTVEELIRRLEEHTRRVLKEVDEEIKRLKEHTEKVLRDVEK

SEQ ID NO: 18549 - protein, 59 aa, Artificial Sequence
  Synthetic
SAEELVKELERRIEELLKELEEIVRRNRKHSEDVLRKIKELVRDVLRRVKEALKDLTKK

SEQ ID NO: 18550 - protein, 59 aa, Artificial Sequence
  Synthetic
EDVVRKLIKEIDDRLKEVKKEVEKLSDENRRLNEDVERRIKELLDDIERLLKEIRDTVT

SEQ ID NO: 18551 - protein, 59 aa, Artificial Sequence
  Synthetic
DVEDIVRRIRERVKEALERLRKTNDDNRKHSEEVLRKLAESDKRTMERIERVLEELRRR

SEQ ID NO: 18552 - protein, 59 aa, Artificial Sequence
  Synthetic
KEVVREMKRKIEELLKRIEDENKRLSDENRELNKRVEEDNRRLNKEIEDELRKVEEDVK

SEQ ID NO: 18553 - protein, 59 aa, Artificial Sequence
  Synthetic
DLEELVKELEKRIEDVLRTLRKTNKDNEKAVEESLRKLEDELRKLKEKIDRLLDKLTKE

SEQ ID NO: 18554 - protein, 59 aa, Artificial Sequence
  Synthetic
EEVVRRIIEDIRRLLEEVKKVNEDLSEENERLNRDAERRVREAIKEVEDLLDEIEKTVR

SEQ ID NO: 18555 - protein, 59 aa, Artificial Sequence
  Synthetic
SVEDELRKLEEKIRRLLEELRRTNDENRRHSEKVLEELRRELEKLKRRIEELLRKLREE

SEQ ID NO: 18556 - protein, 59 aa, Artificial Sequence
  Synthetic
EEVVERLIRDVERKLREVKKENDRASKENEDLNREVKRRAEKLLRDVERLLREVEKTVK

SEQ ID NO: 18557 - protein, 59 aa, Artificial Sequence
  Synthetic
SAEDRLRELEERIRRALKELEDTNRRNEEHSKKLLEELARSDRETEEEIKEALKRLTER

SEQ ID NO: 18558 - protein, 59 aa, Artificial Sequence
  Synthetic
EEVVDRLIREVEERLRDVRRLNEELSKRNKELNDRVREVNEELNRRIKKRLEEIKRRVE

SEQ ID NO: 18559 - protein, 59 aa, Artificial Sequence
  Synthetic
SLEDLVRTIREEIERLMKEAEDTNRRNKEESEESLRRLKKLVEDIDREVKEVLDRAEKN

SEQ ID NO: 18560 - protein, 59 aa, Artificial Sequence
  Synthetic
EKVVEELIRRIKDELKKIRERNKELSDRDKKLNEDVEREVRKLIDEIRKKLEDVERTVK

SEQ ID NO: 18561 - protein, 60 aa, Artificial Sequence
  Synthetic
REVDKVREDVKRLIKEIEDRVRKVLKEDEDLIRELRERVKKVSKENKEVVKTLRELVRDL

SEQ ID NO: 18562 - protein, 55 aa, Artificial Sequence
  Synthetic
ELVKELEKRIREVLERLRRLIERSKEEIDRVLREVEEDVRRNKEENKRLLEEAER

SEQ ID NO: 18563 - protein, 59 aa, Artificial Sequence
  Synthetic
DEKDKVRKTVEDILREIEKIVEDLVRRNERVDREIRERVRELLRRDDEILKRMEEVKRR

SEQ ID NO: 18564 - protein, 56 aa, Artificial Sequence
  Synthetic
EREVTKLKEDIDRLLEKLERDLDELRKRNDELLKELEDRVRKSKEKVEKILRDVRR

SEQ ID NO: 18565 - protein, 60 aa, Artificial Sequence
  Synthetic
SIEDKLRELKERHKELSKRIKEELERLTEEHRRVSEKIRKSLEEDKRRADKVLERIRRER

SEQ ID NO: 18566 - protein, 59 aa, Artificial Sequence
  Synthetic
EDVLRKVEEDSREVLKDSKRLLDEVATRSEEMLRRSEELLKRIHETSKKVLDEIKTKLK

SEQ ID NO: 18567 - protein, 60 aa, Artificial Sequence
  Synthetic
SIEDLARDLERRHKELSEDDKRKLDELRKRHKDVSDEARRSLERDERRVEKVEREITKRR

SEQ ID NO: 18568 - protein, 59 aa, Artificial Sequence
  Synthetic
EKVLDDVRRRSDKMLEDSRRLTREVEETSKEMLERSRRLLEEIHKESDRVLREARERDR

SEQ ID NO: 18569 - protein, 56 aa, Artificial Sequence
  Synthetic
RIEDILRRLEEHHRRLDKENKEILERLKKHHEEVLRKIKEILERLEREARDIERKI

SEQ ID NO: 18570 - protein, 59 aa, Artificial Sequence
  Synthetic
DEVVEKVVREVEDTNEKIRRRSDEVRKEVEDTNRRIDKRLKEVEEEVRRLLDEVRKESE

SEQ ID NO: 18571 - protein, 60 aa, Artificial Sequence
  Synthetic
SELEDVAKKAEDLLTKSAEILKEVVDRHRRLNERSEDEARRVEEEHRRTNKKLLDLARRG

SEQ ID NO: 18572 - protein, 56 aa, Artificial Sequence
  Synthetic
SEELRKLKKRIEDISREHERILRELREHVERVSDKHRKILKELEEDVERILREVTK

SEQ ID NO: 18573 - protein, 60 aa, Artificial Sequence
  Synthetic
SEIEKVVEDIKRLLEESKDRLRKAEEEVRDLSRRSREKLRRAEEDIKRLLDEIERMLRAG

SEQ ID NO: 18574 - protein, 56 aa, Artificial Sequence
  Synthetic
SDELRKLAEEIERVSEEHKRILDELRDHLRKNTKDVRDILRELEKEAERLLRELRR

SEQ ID NO: 18575 - protein, 60 aa, Artificial Sequence
  Synthetic
KDVEDVLKRVKDVNREVEKRLEKVIRDDEKINEEINRRLDEMAERVKRVNETVEDIARKE

SEQ ID NO: 18576 - protein, 56 aa, Artificial Sequence
  Synthetic
EKLVEELRRESDTSKKRVEKLIRELKEKNKRSEERARRIIEKLKKESKDSLKRVKD

SEQ ID NO: 18577 - protein, 56 aa, Artificial Sequence
  Synthetic
EEKEILDELEKEVRDLNRKNKEILRRLEETARDLHRRNEEILDRIRKRVEELKRRV

SEQ ID NO: 18578 - protein, 56 aa, Artificial Sequence
  Synthetic
KDTVAKEAKRLIRDLERLSREIEERVRRLIEEVKEESERIRERVTRLIKEVEDRRK

SEQ ID NO: 18579 - protein, 56 aa, Artificial Sequence
  Synthetic
DDEEILKELEERVKKLHEKNKRILEKLKREVERLNDENRRILKEVKEDVDRLLKEV

SEQ ID NO: 18580 - protein, 56 aa, Artificial Sequence
  Synthetic
SETVARRVEEMIKEVEELSKEIEERAKRLIDRLRELSKRILEELKRLLEEVREKRR

SEQ ID NO: 18581 - protein, 59 aa, Artificial Sequence
  Synthetic
REEDEVLEDARRLSEESRKKLREVERRAKELSDRSRKRLRDVKRRVDDALRKIEDLRRR

SEQ ID NO: 18582 - protein, 56 aa, Artificial Sequence
  Synthetic
SEKLRELEEEIRRNSKDVKEVMKELDKHIKRNSEEVDKVLKELEERLKRLLDRVRK

SEQ ID NO: 18583 - protein, 59 aa, Artificial Sequence
  Synthetic
SDEDRVKDKAEELSRRSREELERVKEEAKRLSDESKKRLEEVTRRIEKVLREIRELRER

SEQ ID NO: 18584 - protein, 56 aa, Artificial Sequence
  Synthetic
SEKLRRLREEIKKNSDEVKKVLRRLEENLRDNTRRVREVLERLEDEARKLLKDVKK

SEQ ID NO: 18585 - protein, 59 aa, Artificial Sequence
  Synthetic
SEVDDVLRRLKELSERSEKTLEDIRDEAEKLSKESEDLLREVLRRSEKVNEDIRRLREK

SEQ ID NO: 18586 - protein, 56 aa, Artificial Sequence
  Synthetic
SRRLEKLRREIEDNSRRVREVLKRLKENIKRNTDRVREALKRLEREHEEVLREVET

SEQ ID NO: 18587 - protein, 60 aa, Artificial Sequence
  Synthetic
SIEEAITRLRKEVEDSNKRSEDVIRELHERDKESLEEVREIIKRLKDKVRTLLEEVDKRV

SEQ ID NO: 18588 - protein, 59 aa, Artificial Sequence
  Synthetic
EEILKEVLKRLRKLLEDNERVLDEARRRVEKTNEEIKEVLKRVAEEVDRLIKEVREEVE

SEQ ID NO: 18589 - protein, 59 aa, Artificial Sequence
  Synthetic
SIDEIIEELRRRIEELRKEAEKIIRDSKKHLEDNKRDADRVIKESKEEVDKLLKEIEEA

SEQ ID NO: 18590 - protein, 59 aa, Artificial Sequence
  Synthetic
EELLEEVRKRIEDLLRELRDILRKLLERDKRLSKESERLVREMLREDRRLLDELRKEVK

SEQ ID NO: 18591 - protein, 59 aa, Artificial Sequence
  Synthetic
SIEEIIRDLRRHIKENAEEAEKVIKESEDHLRENKKRAEDVIRRLEEELRKLAERVRRA

SEQ ID NO: 18592 - protein, 59 aa, Artificial Sequence
  Synthetic
EELLKRAVDAVRKLSEDSKRLVEEALRRDEELSKRSRDLVEEVRRRAEELLRRIEETVK

SEQ ID NO: 18593 - protein, 59 aa, Artificial Sequence
  Synthetic
SSKDDVRRRMKEINERDKRLLDEVLRRLEKLIEELKRHTEEVERDADRIIEEIERMLRN

SEQ ID NO: 18594 - protein, 55 aa, Artificial Sequence
  Synthetic
ERIIKEIRDLIRENEERNKEIVRRIEELLRELEKRSRDVIKRIREKLDRLRKRVE

SEQ ID NO: 18595 - protein, 57 aa, Artificial Sequence
  Synthetic
SKVEEIERRIREEVTRSEKEDRDNVREIRKLVEELRRESKRILDESRRLVKRLIDEA

SEQ ID NO: 18596 - protein, 59 aa, Artificial Sequence
  Synthetic
DEILKRIEEEVRKILEDSRRSTEESHEKVRRIITKIRKLLEDDERRNRKVVREAEEAMR

SEQ ID NO: 18597 - protein, 57 aa, Artificial Sequence
  Synthetic
SKLEELLRRAREVARRLKEELERILKEVEDRVRKSEKEDEDNVKRITDEMRKLKERV

SEQ ID NO: 18598 - protein, 59 aa, Artificial Sequence
  Synthetic
DRVIKRIEEDVRRVIEEIKRLLRELEEEIRRILDESRESTERSHRTARKIVEEVERAAK

SEQ ID NO: 18599 - protein, 59 aa, Artificial Sequence
  Synthetic
SKMETIERRVEEAIRESEELNERDEERVKKVIDELKKLIDDIRRRLEEALRELKKVTDD

SEQ ID NO: 18600 - protein, 55 aa, Artificial Sequence
  Synthetic
EEILKKVRELIEETKRRTDDLHKKVKERVDDIKRRLDELLEEAKRALDEIRERVK

SEQ ID NO: 18601 - protein, 60 aa, Artificial Sequence
  Synthetic
SAVEEIKRRLEEIIRDLERLIDDDRKRVEEMVKRIEDLIKKDEEDVREALKKLEEVVTRG

SEQ ID NO: 18602 - protein, 55 aa, Artificial Sequence
  Synthetic
EEILERADRLVKEIKEKLDRLVKTSEELIRRLEEELRRLHEKVKELMKRAEEKVR

SEQ ID NO: 18603 - protein, 60 aa, Artificial Sequence
  Synthetic
SREDVLREIRRLVEETKKENEKILERLRRLVRTVERRNDEVVKKVRTLVKRLEEEIDKTV

SEQ ID NO: 18604 - protein, 56 aa, Artificial Sequence
  Synthetic
LDELLRKLKEDLDRSKEELKEIEKRVRELLERNKRKTEEVEKEVKRDLDDIRRKLK

SEQ ID NO: 18605 - protein, 60 aa, Artificial Sequence
  Synthetic
SEKEALDEVRKRVEDVRRDNKRILEESERLNRESRKRNRDILERLRKEAEDLKREIDETV

SEQ ID NO: 18606 - protein, 56 aa, Artificial Sequence
  Synthetic
LDKLLEDLERLLKENLDRLRKILEEDRRLNKENNDKLKEIEKRVRELLKDIKDKLK

SEQ ID NO: 18607 - protein, 60 aa, Artificial Sequence
  Synthetic
KEVEDVLRKIRDLVRKNLEDAERVVEEAKRLIDENRERLREVLREDEELNREILKRLREL

SEQ ID NO: 18608 - protein, 56 aa, Artificial Sequence
  Synthetic
EEALKEVRRLIDELRKANKRILEEIRDLVRRLREENEEILRRLKRKNERTADEIRK

SEQ ID NO: 18609 - protein, 60 aa, Artificial Sequence
  Synthetic
SEVEDVLRRIRELLEEIKRRLEDVRRRIKELLDRNRRESEDVLRRDKELNDEVRDKLRKR

SEQ ID NO: 18610 - protein, 56 aa, Artificial Sequence
  Synthetic
ERMLKTVEDLVREVSKEVRRILEELRDEVRKSEEENRRILDKLEKENRKTAEDVKR

SEQ ID NO: 18611 - protein, 60 aa, Artificial Sequence
  Synthetic
SEVEEVLRRIKELLDRNREELKKVRERIKRLLDRNREKSEEVRERDKRLNDEIKKRLDED

SEQ ID NO: 18612 - protein, 56 aa, Artificial Sequence
  Synthetic
KRVLEEARRLVKKSEEDNRRILKELRELVKESERENEEILRELKKLNEDTKKRIED

SEQ ID NO: 18613 - protein, 58 aa, Artificial Sequence
  Synthetic
DEVEEVLRKIEELIRENIKRAREVLEEDKRLNERNKRESEKVLEEDERLNREIEKELR

SEQ ID NO: 18614 - protein, 56 aa, Artificial Sequence
  Synthetic
EEVLRRIKKLIEESMEDNERILRDAERLNRESKERNERILKRLKKRNDETRKEVEK

SEQ ID NO: 18615 - protein, 59 aa, Artificial Sequence
  Synthetic
SSAEEVKERSKRINEEIEKTLEKMLRESRRTNEEIKKTLKRLAEEAEKLLRDVERLVRA

SEQ ID NO: 18616 - protein, 56 aa, Artificial Sequence
  Synthetic
EDIIREIRELNKRTRDKIEEIIERIRKLNKETRDRIRKIMREIEKKIRDLAEEIRR

SEQ ID NO: 18617 - protein, 59 aa, Artificial Sequence
  Synthetic
KSMEEARKKSKEINDRILDRLKKVLEESRKINKDIKDTVERLRERSEDINRRIKELVDS

SEQ ID NO: 18618 - protein, 56 aa, Artificial Sequence
  Synthetic
EEIIKEIRKLNEETRKEIERIAREAEELNKRTADKIETIIREIEKLNKKLKDDIEK

SEQ ID NO: 18619 - protein, 60 aa, Artificial Sequence
  Synthetic
DEVRELVKEIEELIERIERTLRKMTKDSRDLNRKINEKLKKVLEDSRRLNEEIKRTIDSN

SEQ ID NO: 18620 - protein, 56 aa, Artificial Sequence
  Synthetic
ESILRRLEKLLEELRKRVEDIIRELEKLNKESREEIDKIIREAERLTEETERRARK

SEQ ID NO: 18621 - protein, 60 aa, Artificial Sequence
  Synthetic
DEMEELLERIRRLIREIDERLKEMLKRSRELNRELNERNKDVLRRIKELIDRIRRLIERD

SEQ ID NO: 18622 - protein, 56 aa, Artificial Sequence
  Synthetic
ERILRELKKLVDDLRRRIKKILDESKELLERSEKKADESNKELRKLVEELRKEADD

SEQ ID NO: 18623 - protein, 60 aa, Artificial Sequence
  Synthetic
SRVEEIERRIRELIKRIEDRNRKMLETSRRLNEDINRRLRELLERIRKLIEEIEELIKRD

SEQ ID NO: 18624 - protein, 56 aa, Artificial Sequence
  Synthetic
EKILRDLEELLKELARRLERSNEESRRLLEDSRRKMEKIIRELEKLLDDLRRKIEK

SEQ ID NO: 18625 - protein, 60 aa, Artificial Sequence
  Synthetic
DEKEIDEEIERLVRDSKRRSRKVLRDIEELAKRVKEENDRVLEKLRKLIEDLKRKIDETI

SEQ ID NO: 18626 - protein, 55 aa, Artificial Sequence
  Synthetic
ERLKEEVDRVIADSRRLNKEILDEVKRELDKLRKHLEDVLRRAEKMIRDIDEELR

SEQ ID NO: 18627 - protein, 59 aa, Artificial Sequence
  Synthetic
SEVDKVREDVERLSARSEEKVREVLERVKRLLDKSKRDNEDVKRRVRELAERLRDLRRK

SEQ ID NO: 18628 - protein, 56 aa, Artificial Sequence
  Synthetic
KEVLDRIRRRIEENSKKIDDMVKKVRTLVKRSEEESERVLKELRDLMRDVERRIRE

SEQ ID NO: 18629 - protein, 60 aa, Artificial Sequence
  Synthetic
SEVERVEKEIRDLSRKSNEDLKRILDEARELSKKSNEDTKRVLKETRDLLKEIADRLREV

SEQ ID NO: 18630 - protein, 55 aa, Artificial Sequence
  Synthetic
EEVKKRVEESLRENEKLLRTIAKEIEDLVRENRKVNEDVNREVEKLVRELEERIK

SEQ ID NO: 18631 - protein, 61 aa, Artificial Sequence
  Synthetic
REVEELLKRIRELVKRNNEKTKRLLDESRRLNEEANRRLDKVLKELRDLAKRIKEELDEKG

SEQ ID NO: 18632 - protein, 55 aa, Artificial Sequence
  Synthetic
EDLEREVKKLLDENRESSERVIRESEKSLRDHAERTRKVREEIRKLLEELKRAVE

SEQ ID NO: 18633 - protein, 56 aa, Artificial Sequence
  Synthetic
SEKEDIKRKLDDLLRRHREVSRESNRELKRLLEEHRRTSKRLDDEIKRLLREIEEA

SEQ ID NO: 18634 - protein, 56 aa, Artificial Sequence
  Synthetic
TETVRKEIEDIARRSKEKLEKNTRDVKRMVDRSKEELKRILKELEDAIREIKKKVD

SEQ ID NO: 18635 - protein, 60 aa, Artificial Sequence
  Synthetic
SEKERILERLKELVERSNEKLERILRRSEKLFTDSNKELKDILDRARKLIEEIDDRIRKV

SEQ ID NO: 18636 - protein, 55 aa, Artificial Sequence
  Synthetic
KKIRDDAERLITENKERNERVNKRDEDLLRRNRKENEELNRELERLVKEIREKLK

SEQ ID NO: 18637 - protein, 60 aa, Artificial Sequence
  Synthetic
EEKERILETAKKLAEEIKRRAEEILKRSEELVRDSNKKLREVLEEARRLIKKIEDEIREI

SEQ ID NO: 18638 - protein, 55 aa, Artificial Sequence
  Synthetic
KEIEDEVRRLVREIEELLRDIERRDKELLDENRKLNEEVNRDAERLVRKIRKALE

SEQ ID NO: 18639 - protein, 60 aa, Artificial Sequence
  Synthetic
SEVEELLRRIRELSKRSKDEIKRMLKEIRELSEKSKRDIERMLRRNEDLARKIKELIDRD

SEQ ID NO: 18640 - protein, 55 aa, Artificial Sequence
  Synthetic
EEIKREVEKLLEENRKLLEDLEEDVKRLIEENKRALEEVERESKRLNDESRERTK

SEQ ID NO: 18641 - protein, 57 aa, Artificial Sequence
  Synthetic
DDLERVLKEIKKAADKIREDNKRTADKIRKRVKELDDETRDMLRRIRKLVKEIKERV

SEQ ID NO: 18642 - protein, 59 aa, Artificial Sequence
  Synthetic
DEALRRVEEEVERLIRDLRRVLKETSDRVRELIDKHRRLSEEVEKDVKRLIDELKKKTD

SEQ ID NO: 18643 - protein, 61 aa, Artificial Sequence
  Synthetic
SEIEEILERIKKISEDSKRRLEDILRKAKKISDESRETNKKTLEDVRRIADEIRKRLEEAG

SEQ ID NO: 18644 - protein, 59 aa, Artificial Sequence
  Synthetic
KDKLERVEREIRRLIKENKDIVERIERAIEELVRRNEKSVEDSKKDIKRLVDELDREAR

SEQ ID NO: 18645 - protein, 57 aa, Artificial Sequence
  Synthetic
SEVERIKERIDKLVEENRKLVEEIEEEDRRLLEENREIVKRIEEEIEKLLRDLERRV

SEQ ID NO: 18646 - protein, 59 aa, Artificial Sequence
  Synthetic
EDVLRDILREIERLSKESKDRLKDLLRKSEELSKESKKLLKDILKKVEDLIREAREEAR

SEQ ID NO: 18647 - protein, 60 aa, Artificial Sequence
  Synthetic
EEKERLKKSLEDLAKRIRDILRKHEEDSRRLSKEIRDVLRRHREASRKLVEEIKELIKSV

SEQ ID NO: 18648 - protein, 59 aa, Artificial Sequence
  Synthetic
EEMLKRVLEELERIVRDIERRIKEASERIRKIVEDIKKRIKEADDRIKDIVREIAERIR

SEQ ID NO: 18649 - protein, 60 aa, Artificial Sequence
  Synthetic
DEEEEALKDVERLLRRNEKLIEEHERRSEKLLRELEDVVRRHEERSKELLERIRERIKRL

SEQ ID NO: 18650 - protein, 55 aa, Artificial Sequence
  Synthetic
EEVLKKLRKLSKESEDDIRKMSEEVEEIVRRIKRLLEEATRKLEELVKRIEERID

SEQ ID NO: 18651 - protein, 60 aa, Artificial Sequence
  Synthetic
DEDEEAKREVERLLRENEKLIEDHKRLSEELVRRLEDLIRRHEETSERLLRELREIIKRQ

SEQ ID NO: 18652 - protein, 55 aa, Artificial Sequence
  Synthetic
EDVLRELRDLSRRSKEEIKKMSEEIEKLARDILKRIREMTEEAKRIVKEIKDRIR

SEQ ID NO: 18653 - protein, 61 aa, Artificial Sequence
  Synthetic
SEIERVLKELDEVSKKSLEEIRRMSEESRRLSKESIDRIREMLERAREKADRIRETIKREG

SEQ ID NO: 18654 - protein, 59 aa, Artificial Sequence
  Synthetic
KDKLRRLRERVEELKKRNEDLLKEHRDENKRLIDENRDLVDKLRKTIKRLIDDLERRVR

SEQ ID NO: 18655 - protein, 60 aa, Artificial Sequence
  Synthetic
SKVDELRKTVEKLLRELRDSLRRYEEESKRLLEELDDSLRRSKKTVEDLLREIKEILKRV

SEQ ID NO: 18656 - protein, 55 aa, Artificial Sequence
  Synthetic
DRAKERLERLVRKIKEDNKRSLTENERLVRKIKKENEDAIRRLKDVAKKIKEELT

SEQ ID NO: 18657 - protein, 57 aa, Artificial Sequence
  Synthetic
SEKEELKKEIRRNLEENKDVLRRHEEENRRLKKRIKELLERHARTNKRLKEEIDRTI

SEQ ID NO: 18658 - protein, 59 aa, Artificial Sequence
  Synthetic
SRLLEELLRKLEKLSRDSKEKLKEISKRSKELVKRIERELEKMTKKSRDLVKKIKEEEK

SEQ ID NO: 18659 - protein, 60 aa, Artificial Sequence
  Synthetic
SEVEELRKELERIVKETKDVAEELSRESEEVLKKSEENLRRLTEKSDDVLRRVAELIRSN

SEQ ID NO: 18660 - protein, 55 aa, Artificial Sequence
  Synthetic
KELKERIERVNREVREEARKHHDKNRDIRRRVTELHKRHKERNEEIRRKVEEDAK

SEQ ID NO: 18661 - protein, 60 aa, Artificial Sequence
  Synthetic
DEIEDLRRKVEKVVRDAEKVLRDLSRKSRKVHEDSRENVDRLLKEVEDVVKRVADLIRSN

SEQ ID NO: 18662 - protein, 55 aa, Artificial Sequence
  Synthetic
EELKRTLEELLKRVEDLVRRHHEENKKLTDDNRRLHRRLRERLKEVLREVERRRD

SEQ ID NO: 18663 - protein, 60 aa, Artificial Sequence
  Synthetic
SDVERIEEELRKLTEENRKLTETLKTELRKIRREVEKILKELEDRLRELSERVKDLIRKR

SEQ ID NO: 18664 - protein, 59 aa, Artificial Sequence
  Synthetic
KEVLDDIRRKLKKLHDESKKTHRDILERLKEALKRLLELAERVLEELERRAEELRREIK

SEQ ID NO: 18665 - protein, 60 aa, Artificial Sequence
  Synthetic
DDVERLEERLKELDKRNKELTKDLEDKLRKLTRDNRELLKKIEKRLEEVRREVKRLITER

SEQ ID NO: 18666 - protein, 59 aa, Artificial Sequence
  Synthetic
KEVAERIREELERLHEESKRLHEKILEDLERAHDETRRIVEDILRRLEKVARELKEEIR

SEQ ID NO: 18667 - protein, 57 aa, Artificial Sequence
  Synthetic
DELRELIKTLREILERLLDRSRRLNDKLKEILERIERASKKMNDDDRRRVRRLEEEV

SEQ ID NO: 18668 - protein, 59 aa, Artificial Sequence
  Synthetic
SRRLEDVERVVEEAKRALERSLRENEKSVEDIKKRIRESVEENKKSVRDTLERLKRTLE

SEQ ID NO: 18669 - protein, 57 aa, Artificial Sequence
  Synthetic
STEEEVRKRVEEIERTLRESLERNRETVERSEERLEELLRRARRVVEESKKRLDKEI

SEQ ID NO: 18670 - protein, 59 aa, Artificial Sequence
  Synthetic
DEVMRDLIRKLEDILRRLKEESDRLNEEHKEILKELVRRLEEIIKEHREIVERILKKTR

SEQ ID NO: 18671 - protein, 56 aa, Artificial Sequence
  Synthetic
DEEEEVKRLLDRIREEVKRLHDENKKRLDELRRTVDKLLRESERENKRVNDEVRKD

SEQ ID NO: 18672 - protein, 56 aa, Artificial Sequence
  Synthetic
VETLKRRIEDVLRRVEEESRRLNKELEDVLRRAKELVDRSKKKLEEVLRRVKEKAK

SEQ ID NO: 18673 - protein, 56 aa, Artificial Sequence
  Synthetic
DEEREIEELLRTLTREVKRLLDESRKLNEEILRKVKRLHDENRKRIREVLEDVKRR

SEQ ID NO: 18674 - protein, 56 aa, Artificial Sequence
  Synthetic
VETLKEEVKRALEEVEKRVRDSKRDLKRVAEEVEETSRRLNDELRKVREDVRRRAT

SEQ ID NO: 18675 - protein, 61 aa, Artificial Sequence
  Synthetic
EEAERIADEARKVEEDVRRMVEESKRKLKKVLDDSKRLIDELKRRLEDIRRKVAEMAKRLR

SEQ ID NO: 18676 - protein, 59 aa, Artificial Sequence
  Synthetic
ERVLRDIERLLEEIRRELERLARESEKVNERVNREDRRLLEEIRELLERIRKELEERTR

SEQ ID NO: 18677 - protein, 56 aa, Artificial Sequence
  Synthetic
SLKEEVDELLRRIEEEIRRLADKSRRTNERVKEEIDRLARESEETNKKLKKKIEDI

SEQ ID NO: 18678 - protein, 59 aa, Artificial Sequence
  Synthetic
AKIVKKLLEDLKRLLKEVKELMERINKETKELLERVAREVKRLNTDTERLLKEVEDRVR

SEQ ID NO: 18679 - protein, 60 aa, Artificial Sequence
  Synthetic
SEREEIEELSRRSRRSLEELKKEIRKVNERNKRLLEELEREIRRVSKESRDRLRELRRRL

SEQ ID NO: 18680 - protein, 56 aa, Artificial Sequence
  Synthetic
TKDLIRRLRELTRTIERRATELIKRLEEVSREIAERVRKLIKELRDMTRKIDEDAR

SEQ ID NO: 18681 - protein, 59 aa, Artificial Sequence
  Synthetic
SEVEKLLERLKKILEEIARLVDRSNTEDDKILRKAEEDVRRLLDKLKKILERAAELLAR

SEQ ID NO: 18682 - protein, 59 aa, Artificial Sequence
  Synthetic
EKLRREIRKLVKELKETIKRLEKKSRDTVKRTEDELRRLEEEAERLITELKERLDELRK

SEQ ID NO: 18683 - protein, 60 aa, Artificial Sequence
  Synthetic
REDEEMLKDLKRVLEDAERVSRDTLRELEDAVRRLHELSEDTLDKLRKVLEEADRLIRSN

SEQ ID NO: 18684 - protein, 55 aa, Artificial Sequence
  Synthetic
EDVRRILERVRKELKRLLEENEKLLRRVEKELEENERRNEEEIRRVKKTVEERAK

SEQ ID NO: 18685 - protein, 59 aa, Artificial Sequence
  Synthetic
SRVEEVLKENRDTNEELKDTVRKILETNRRTLERAEEEVRKILEDLRDIARKIEEMVEN

SEQ ID NO: 18686 - protein, 59 aa, Artificial Sequence
  Synthetic
KEMLERLRRSLEESKETVKRLLEELRKSLEKSKRDVERLLKELEDLLRELEKKVDDRRR

SEQ ID NO: 18687 - protein, 59 aa, Artificial Sequence
  Synthetic
DEAREILTRIRKLLEEIRKEAEEVSERHKRLVDELDKEVKDINKRAEDLLRELAEIVKR

SEQ ID NO: 18688 - protein, 56 aa, Artificial Sequence
  Synthetic
EKEVRKVLEEIKRVLEELKRHAEDNLRRAREVLKKLADEAKRVNERSEELLRELKK

SEQ ID NO: 18689 - protein, 60 aa, Artificial Sequence
  Synthetic
SMADEILRELKELTEEIERRVREASREHRERLEKLRREVREINKELKRRLDELREIVERG

SEQ ID NO: 18690 - protein, 56 aa, Artificial Sequence
  Synthetic
KDRVEKILRENKERTDRLRRHIEKNLEDARDLLRKLKEEVKRVNEESEKSLRDLRK

SEQ ID NO: 18691 - protein, 60 aa, Artificial Sequence
  Synthetic
SLEEDIRRILDENRRSTERIKEEIREINERDKRSLEDIERRIRKVLEDLRKLLEDLAREG

SEQ ID NO: 18692 - protein, 59 aa, Artificial Sequence
  Synthetic
EEAVRKILKEVRDVNEELKRRVEKILEDIRDANRRLRETVEEIIRRAKEAVDKLRDEVR

SEQ ID NO: 18693 - protein, 59 aa, Artificial Sequence
  Synthetic
SEKERVDDLLRRVDELLKRSKREVEKLLEDNKRLLERIERENRRLTKELEDKVRRLKEK

SEQ ID NO: 18694 - protein, 56 aa, Artificial Sequence
  Synthetic
VEEIAKEIRDVLREHKELIDEIRKKAKKISDKSRKLMEELERHLRRVIKELDEKAR

SEQ ID NO: 18695 - protein, 60 aa, Artificial Sequence
  Synthetic
SEEEEVEELLRRNRKKAEEVDREIDRLLKEVEKLVKDSRKRIEDLLRRAREKVEDLRRKG

SEQ ID NO: 18696 - protein, 56 aa, Artificial Sequence
  Synthetic
VREISEEIERITRETEDRIRKIAEEIRRVLKRHKELIEELEKEIRDVLKKLDDDVR

SEQ ID NO: 18697 - protein, 57 aa, Artificial Sequence
  Synthetic
SEIEKLLKDLRDLLKKSEETVREMLKRLEEIVRRAEEDHKRLLEKLKRLLEKLRRDV

SEQ ID NO: 18698 - protein, 59 aa, Artificial Sequence
  Synthetic
EEVRKRLEDLADEVDKRNRDIERKIRELMKRAKEVSERLNKELEDLAREAEKLLRELKK

SEQ ID NO: 18699 - protein, 57 aa, Artificial Sequence
  Synthetic
DEIEELLKRLRDIVRKIREDHERLSRESERINKDARRRHDEMLRRLEELLRKVEKEV

SEQ ID NO: 18700 - protein, 59 aa, Artificial Sequence
  Synthetic
EKVKRDIERIRKEVKEESKRLNDHIRDNERRNKESSEELNRRIKKIADEVRELLEKLKT

SEQ ID NO: 18701 - protein, 56 aa, Artificial Sequence
  Synthetic
REEERLRELMDESRKRIEAVEKRARDLKRKSDRLIEDAARKIKTILDKIRKLIEDL

SEQ ID NO: 18702 - protein, 56 aa, Artificial Sequence
  Synthetic
LKDVEKKIREVNKTVKEEVDRLVEKNERLNDEARRVVKELLDKVERMLEEVEREAR

SEQ ID NO: 18703 - protein, 60 aa, Artificial Sequence
  Synthetic
SEKEDMARKIKELIDRDRERIERVIREIEKLIKELRDHNKRVLETDKRLLDDLKRVADDG

SEQ ID NO: 18704 - protein, 55 aa, Artificial Sequence
  Synthetic
EDLRRLKEEVDRVAEETRRLLEEIKKKVDKVVREVETSNRRSEEEVRRLLDEIRR

SEQ ID NO: 18705 - protein, 60 aa, Artificial Sequence
  Synthetic
DEKEEAARRVEKLITELRKHNEDVLRDIKRLIDELRRHNEEVLKRDRELLERLRKVAEEG

SEQ ID NO: 18706 - protein, 55 aa, Artificial Sequence
  Synthetic
KELDDLRKRAEDVLRDLRRTNRKILEDVRRVIEELERSNERSLTEVERLLREVRK

SEQ ID NO: 18707 - protein, 59 aa, Artificial Sequence
  Synthetic
SEKERVLTELEKILEELRRRVEEILKEIEKLIEELRRHNERALERDKKLLEELKEVRER

SEQ ID NO: 18708 - protein, 55 aa, Artificial Sequence
  Synthetic
RELEKVKEKLDRLMKDIKEKLDRVKEKVRRVLKELEESNRKSEKDAKELIDRIRK

SEQ ID NO: 18709 - protein, 57 aa, Artificial Sequence
  Synthetic
SEVEDLLRDIERLIEESRRLVERLLERLEELIRRHTRLVEELIRELERMLKKVADEV

SEQ ID NO: 18710 - protein, 59 aa, Artificial Sequence
  Synthetic
DEIRTEIKKVVDKAREVNKRIKELIDKIKREAEENSKRANELIERITREIRRLLEDLRR

SEQ ID NO: 18711 - protein, 60 aa, Artificial Sequence
  Synthetic
SELEELRKRVKDLIRETKKLVEEVAEKVERLNKETKKLLEDVARIVEELIRRAEEVAERI

SEQ ID NO: 18712 - protein, 59 aa, Artificial Sequence
  Synthetic
EEVLRDIERLAREIEKVNREAEERIRRLKKKSEETNERVKRAIDKLAEELRRVLEEIRR

SEQ ID NO: 18713 - protein, 60 aa, Artificial Sequence
  Synthetic
SELEELAKAVEKLLEDLRRMTREVEEKVKEINERTKKLLKDVAERVKTLLREIEELAKKI

SEQ ID NO: 18714 - protein, 59 aa, Artificial Sequence
  Synthetic
REVLKAIKELMERIKKTLDEIRKRIKELEDESEKTNRELKKKIEDLKRELEELLREIKR

SEQ ID NO: 18715 - protein, 61 aa, Artificial Sequence
  Synthetic
SEIDEVIKTLEKLLEDLRRELEELSRRNKKVLEDILRRVKRLSDENRRLLERIKRTVDKRG

SEQ ID NO: 18716 - protein, 59 aa, Artificial Sequence
  Synthetic
EKIEKKVKEVRERVKEVLERIERLVDENRRENKEVVDRIKKLLKENEEEVREVLKRIRD

SEQ ID NO: 18717 - protein, 61 aa, Artificial Sequence
  Synthetic
SEIDDLVKKNKELVKKIREDVERLSEENKEVLKDIERKVRKVSEENDRLLEEIKDTVRKRG

SEQ ID NO: 18718 - protein, 59 aa, Artificial Sequence
  Synthetic
RKVEKKVRENKKENEDVLRDIERLVKENKDRNREVLKRIEDLLRKNAERVKRVADEIRR

SEQ ID NO: 18719 - protein, 59 aa, Artificial Sequence
  Synthetic
KEVEDIVDDVRRVIEELKRKVEEVSKKNEKLVREIEERVERISRRNKKLIKELKEIVDR

SEQ ID NO: 18720 - protein, 56 aa, Artificial Sequence
  Synthetic
EELLRKIARDLEKVREEIKELVKENRKTNEEVVRRIEKLAKENDDENRKVLKEIED

SEQ ID NO: 18721 - protein, 60 aa, Artificial Sequence
  Synthetic
DEVERIVEDIRRLLDEVRREVEKVSRENKELVDRVREKVKEISKRNKKLAKDLTDLVREG

SEQ ID NO: 18722 - protein, 56 aa, Artificial Sequence
  Synthetic
KELLDRIKEEIERVIKEIRELVEENKRTNEEVLRRIRELARRNEEENKRVLEDIRR

SEQ ID NO: 18723 - protein, 60 aa, Artificial Sequence
  Synthetic
SVEELIKEVKDRLRKVLREIEELIRENEEENRKNVEDVKRTADKLRRDLEKVVDEIDKRV

SEQ ID NO: 18724 - protein, 59 aa, Artificial Sequence
  Synthetic
KEVIDKVVKRVEDLVREIKEEVDKISEENKELVKRDTRRVEEVRERIRKLVEELRREVT

SEQ ID NO: 18725 - protein, 61 aa, Artificial Sequence
  Synthetic
SEIDRVIEKSDKTNEEIKRDVDRAVRRSEETLKRIRETVEEIVKTVEKLIRDLRRRVEDKG

SEQ ID NO: 18726 - protein, 56 aa, Artificial Sequence
  Synthetic
KDKAKELRDRLERSLREIAKKIKKVLDDTDRVLRDIERTIEELKKRLREVLERVRK

SEQ ID NO: 18727 - protein, 61 aa, Artificial Sequence
  Synthetic
SEIDDVIKKLKDLIEELEREVKEMSDENKRLLEEIEERVKEAIKRSKDTLEEIADRVRKKG

SEQ ID NO: 18728 - protein, 56 aa, Artificial Sequence
  Synthetic
KDKATKIEKDLRDVLRKIEKTMEDNRRENEELLKKVEEEVRRLEEETEKVLRDLRR

SEQ ID NO: 18729 - protein, 60 aa, Artificial Sequence
  Synthetic
SEVDEILKRIEELIRRIEDEVEKMIRESEDTIRRDEKEVKDAVRELADLIRRIEKRVRER

SEQ ID NO: 18730 - protein, 56 aa, Artificial Sequence
  Synthetic
EKKVREIDKRLKDALREIRKLIERSKEESRRALKRSRELMKRLEEELRRVLKEIRD

SEQ ID NO: 18731 - protein, 61 aa, Artificial Sequence
  Synthetic
DEVDKVLKRIKELIDEDKKEVEKVIRDSKRTLREDEERVRRAAKEVEDRIRDIEDIVRRRK

SEQ ID NO: 18732 - protein, 56 aa, Artificial Sequence
  Synthetic
KKKLEDIDRELDRVLEESKKEIEKSKRESEEVLKKSRDLVKRLAEELKRVLDEIRR

SEQ ID NO: 18733 - protein, 60 aa, Artificial Sequence
  Synthetic
SRVEEVLKEIDKLIKEIKERVKRLIEESKRLNREDEERVRKVIEESKKTLEEIREVMERN

SEQ ID NO: 18734 - protein, 56 aa, Artificial Sequence
  Synthetic
KDLLREIERRLREMLKEIEERIRRSKREVEESAERSERLIRKSEEDSERVLRELRR

SEQ ID NO: 18735 - protein, 60 aa, Artificial Sequence
  Synthetic
DEVERILERIEELLRKIRKDVEEAIKDSERLNKDDLKRVRDAVETLRELIRRIEEEVRRR

SEQ ID NO: 18736 - protein, 56 aa, Artificial Sequence
  Synthetic
KDLARDIDEKVRRLLEDIRRLVEESEKKVDESTEESRRLVTELERELREVLKRIRD

SEQ ID NO: 18737 - protein, 57 aa, Artificial Sequence
  Synthetic
SRVDELVKEAEDLLEEAKKANAESIRRIEELLKRVAEEIRRLSEEDKKLVEEVRKRV

SEQ ID NO: 18738 - protein, 59 aa, Artificial Sequence
  Synthetic
KRAEDKLRRVEEDARRVLEDLKRTLKRLEEEVRRVLEEARDILRKNAEENRKVLEDLRR

SEQ ID NO: 18739 - protein, 57 aa, Artificial Sequence
  Synthetic
SRVEELVEELKRLLRTVEKENEDSIREIERLLREVKRRNEESSREDEKTIRTVRREV

SEQ ID NO: 18740 - protein, 59 aa, Artificial Sequence
  Synthetic
KRAEEILERLRKEAEEVLKKLEDTLRELRKRAEKVLRDMEETLKKNKKDNEKVLRDLRK

SEQ ID NO: 18741 - protein, 57 aa, Artificial Sequence
  Synthetic
SEVDKIIKEIEDLLDEARKTNEKSSRDDKRLVEEVKELNKESSERNKRLVKEAREKI

SEQ ID NO: 18742 - protein, 59 aa, Artificial Sequence
  Synthetic
KRAEDKIRRIAKDAEDVLRTMEKTLRDNERENREVLKELEKTLRENEKENEKVLRDLKR

SEQ ID NO: 18743 - protein, 56 aa, Artificial Sequence
  Synthetic
EEIERVEEKVRRLIKELEDELRKIEERIERLLRRSRERNKEISDRNRRLLEEMRRS

SEQ ID NO: 18744 - protein, 56 aa, Artificial Sequence
  Synthetic
EEKARELEEELRRAVERVDRKIEELEERLDRVLKESRDTVDENEKRNEKVLRELET

SEQ ID NO: 18745 - protein, 56 aa, Artificial Sequence
  Synthetic
KEIEDVVETVRRLLRTSEELNERISRDNEKLLRDSEKLNREISERNRKLLKDLKDS

SEQ ID NO: 18746 - protein, 56 aa, Artificial Sequence
  Synthetic
EEAARDLARKLKEVHDRSRETIKRNEDKNRRVLEESKKTARENEERNKRVLDELRK

SEQ ID NO: 18747 - protein, 60 aa, Artificial Sequence
  Synthetic
SEEDRVLEDVERLLRELKKETDRIAEKNKKLNEDVTRETEEIVRRVRELLERLLDLVRKV

SEQ ID NO: 18748 - protein, 56 aa, Artificial Sequence
  Synthetic
SEKAREVEREVRRIREEDERILRELEERNRENKKRDEDILKELEDRAERVLEEIKR

SEQ ID NO: 18749 - protein, 60 aa, Artificial Sequence
  Synthetic
SEEDRVLKEAKDLLEEIERELDEVAERNKELNKRLTDETRKIERRVRELLRELKDKVRKV

SEQ ID NO: 18750 - protein, 56 aa, Artificial Sequence
  Synthetic
SRKLEKLEKEVREVEKRIRDILKKLEDDNRANRKRDEDIIDELRKEADRVREEIKR

SEQ ID NO: 18751 - protein, 59 aa, Artificial Sequence
  Synthetic
SEVEELVRRVEKSNRDIEEMVKKIDKRNRDLLRKIEKDLREADRRNEELLREIDDLVRR

SEQ ID NO: 18752 - protein, 56 aa, Artificial Sequence
  Synthetic
EKLLKEVEDRNRESAKEVKRLADENRKANEELKRRVEKLVRDNRRKNEELKKKVKD

SEQ ID NO: 18753 - protein, 59 aa, Artificial Sequence
  Synthetic
REVEELLKEIRKRIEDVRRRVEEIDRRNRKLLKEVEERLEKVRREVEKSNTDIKELAER

SEQ ID NO: 18754 - protein, 56 aa, Artificial Sequence
  Synthetic
EDLLRRVREEIERVIREVKRLLEENKKRNDEVRKRVEDIVRRLEEHHRELKRRVEK

SEQ ID NO: 18755 - protein, 56 aa, Artificial Sequence
  Synthetic
KDIEDILKESEKTNREILKRAEDASEENERINKRITDRVDRVRKEIERLLEELTRR

SEQ ID NO: 18756 - protein, 56 aa, Artificial Sequence
  Synthetic
KKLVDELRRRVEETLKRLRKLIADNREKNKDNLRRIEEEVKKLEEEIKKIKDEMKR

SEQ ID NO: 18757 - protein, 56 aa, Artificial Sequence
  Synthetic
KELEDIARESEKTNRDIKRRVDEVRKTIEDLLRRIDEEVKRAAEESKDTNRRIREE

SEQ ID NO: 18758 - protein, 56 aa, Artificial Sequence
  Synthetic
EDLMRKLKREVEETDKEIKDIIRRLKEEIEKIKRKIEEIIKKLKKENEDTRREADK

SEQ ID NO: 18759 - protein, 56 aa, Artificial Sequence
  Synthetic
SDIDDILRESRKINKEINDTVTEMMKRSKKTNDEIREKVKEVREESEKTNEEIRRE

SEQ ID NO: 18760 - protein, 56 aa, Artificial Sequence
  Synthetic
EKLVKELEDELRKSEERARRIIERLKEELKKTRKEIEDIIRELRKKLEDTLRDVEK

SEQ ID NO: 18761 - protein, 56 aa, Artificial Sequence
  Synthetic
SDIEKILRESKDINRRINERVDRVVERSKKTNEDILKKVKDAAEESKKTNDDIRKS

SEQ ID NO: 18762 - protein, 56 aa, Artificial Sequence
  Synthetic
EELVRELRRLVEESLKRIEKIIKDLEELIKETKRRLEEIIERLEKKNEDTEREARK

SEQ ID NO: 18763 - protein, 56 aa, Artificial Sequence
  Synthetic
DEIREIVKESKRINEEINRKVEEVVRRSEKTNEDIRDTVRRLVRESDETNRRIEES

SEQ ID NO: 18764 - protein, 56 aa, Artificial Sequence
  Synthetic
EDLVRELRKEVKRSEDRIRKIIRDLDELNRRSKEDIKRKIDELRKRVEETKRRVTK

SEQ ID NO: 18765 - protein, 56 aa, Artificial Sequence
  Synthetic
DDIEEILKDVKRLLDEILAKVKKASDDNKRILDEIERKVEEMVRRSEKTNEDIRRS

SEQ ID NO: 18766 - protein, 56 aa, Artificial Sequence
  Synthetic
EELVRELKKRVDEIKERARRLIEENRERNKEIKERAERIIERLRKINEDTKREAEK

SEQ ID NO: 18767 - protein, 56 aa, Artificial Sequence
  Synthetic
DEIEDIVRRVKKLIRDLEERVKKLEEDSDRTNERIRREAEKASKRNKEILDKLRKS

SEQ ID NO: 18768 - protein, 56 aa, Artificial Sequence
  Synthetic
EELVKELRKELEEVKEEIRKIIEELKRRNDKSRRDLERLIRDNEDKNRRLKKEAED

SEQ ID NO: 18769 - protein, 56 aa, Artificial Sequence
  Synthetic
EEIERIIRESEKINKEINRTVKEVEKRSEETNRRIREELKRISKRNKEILDRLRKE

SEQ ID NO: 18770 - protein, 56 aa, Artificial Sequence
  Synthetic
EKEVEKLKRKVEKSEEDIRRIIEKLREENKRSEEEVRRLITENEKRNRKLLEEAKK

SEQ ID NO: 18771 - protein, 56 aa, Artificial Sequence
  Synthetic
SELEKIAEDSERINKEINERVKRISDENKRILEEIEKAVEEASRDNKRILDELRKS

SEQ ID NO: 18772 - protein, 56 aa, Artificial Sequence
  Synthetic
EELVRELERRVDESRKRAEDLIRDNKKKNDEARRRVEELIRRNREENRRIAEEARK

SEQ ID NO: 18773 - protein, 60 aa, Artificial Sequence
  Synthetic
SDAERIMRESEELNERINDVVRRVAEESKRLNDRINDVLREVSKRNKDLIKRIKEVVDRN

SEQ ID NO: 18774 - protein, 56 aa, Artificial Sequence
  Synthetic
ERIIERLDRLTKKSLEELKRIIEDLKRRTKESEDRARELIKRNREENKRLLEEAEK

SEQ ID NO: 18775 - protein, 60 aa, Artificial Sequence
  Synthetic
DEAERIREESEELNERINREVDKMIDEDRKLNEDIRRTVEEMVREIKELLDRIRKVLEEN

SEQ ID NO: 18776 - protein, 56 aa, Artificial Sequence
  Synthetic
KEIIKELRETTERSRKRLEELIRDSEEKNRRTEDELEKIIRELDERLRRLEEEARK

SEQ ID NO: 18777 - protein, 60 aa, Artificial Sequence
  Synthetic
DEAEDIARKSRELNERILRRVKEMIDEDRDLNREIEKTLRRVSERNRELVEEIKREVERN

SEQ ID NO: 18778 - protein, 56 aa, Artificial Sequence
  Synthetic
ERIIEELRRLTEDTKRRADKLIKDSEDENRKTLRRARELIEENRDRNRKLEEDVRR

SEQ ID NO: 18779 - protein, 60 aa, Artificial Sequence
  Synthetic
DEVREIVKRSDDLNDTIREVLKRVADDSRRLNEEIRRKVTEASRENEELIKEIEDRARKN

SEQ ID NO: 18780 - protein, 56 aa, Artificial Sequence
  Synthetic
EEIIKRLRDRTKKTLDEVRKIIEDLKDESRKTSEELRELIKRNKEKNDELLERLER

SEQ ID NO: 18781 - protein, 60 aa, Artificial Sequence
  Synthetic
SEAEKIERESRDLNRRIREVVERASEDNERLIREIRKRLEEVVRTIEKLIRDILERVRKN

SEQ ID NO: 18782 - protein, 56 aa, Artificial Sequence
  Synthetic
EEIIKELKKITDKTRRELERLIDENRKRNEELLKRVEDIIRELKRRLEKLDEEVKR

SEQ ID NO: 18783 - protein, 60 aa, Artificial Sequence
  Synthetic
SEVERIEKESRDLNREIKEEAKRASEDNRRLLEDIRRKLEKVSEENKDLLRKIEEEMRRN

SEQ ID NO: 18784 - protein, 56 aa, Artificial Sequence
  Synthetic
EEIIKKLKRLTDETEKELEKLIRKNEKENRDLEREIRRLIKENRDRNRELKKRAED

SEQ ID NO: 18785 - protein, 60 aa, Artificial Sequence
  Synthetic
SEVEKAVREIEELIKRIEDRLREMARRVEETNKTLLRDVERLSKENEELVREIKERVREN

SEQ ID NO: 18786 - protein, 56 aa, Artificial Sequence
  Synthetic
EELVRELERKIKTVLDRVEEIIRRLDKKTKDTVRRVRELIEDNKRKNKKILDEVRK

SEQ ID NO: 18787 - protein, 60 aa, Artificial Sequence
  Synthetic
SEVERIVKESEELNEKITRDLEEAEKEVRKTNDEIRRVVEEMSRRNEKLIRDIDDEVRKR

SEQ ID NO: 18788 - protein, 56 aa, Artificial Sequence
  Synthetic
DEIIKELEKKTRDNLDKVRKIIERLRRETDKTEKELRDIIRKNEDENRKLEEKVRR

SEQ ID NO: 18789 - protein, 60 aa, Artificial Sequence
  Synthetic
SKVEKLAKEVEETNRRILDEVRRASEENKDLVRRIEETVKRAVEEIKRLIEKIDDVVTKN

SEQ ID NO: 18790 - protein, 56 aa, Artificial Sequence
  Synthetic
EEIIKELRKRSEDSEREARKLIRRNEEENEKLRKKLKEIIDRLREELEKVLDRVRK

SEQ ID NO: 18791 - protein, 61 aa, Artificial Sequence
  Synthetic
SEVERAAEESKRLNKTIRDENREVLREIRDLIRRMKEENRRMVKRVDEVLKEIRELFRRDK

SEQ ID NO: 18792 - protein, 59 aa, Artificial Sequence
  Synthetic
EKVREILERLERESRKTAKELDESNREAEELLKRVADEAKKSNETLRERLERLAREAEK

SEQ ID NO: 18793 - protein, 61 aa, Artificial Sequence
  Synthetic
SELEELIRKIEELIRRIEEENKEMVRRSRKLNEDLERRLDEVRRRVEKLIREIEELLKRDK

SEQ ID NO: 18794 - protein, 59 aa, Artificial Sequence
  Synthetic
ERAKRLLDELKRLIKELEDKLRESNEELKRRSDDSARKAEKILRELKKKVDEMADRARK

SEQ ID NO: 18795 - protein, 60 aa, Artificial Sequence
  Synthetic
DEAEKLAEDVRRVIKRIREDNKRLSDRNKELLEEVEKDNKKSEEDVKRVIEDIERRVREL

SEQ ID NO: 18796 - protein, 56 aa, Artificial Sequence
  Synthetic
RELLDELRRRIEELRKRLEDSNRENEEELRKIADKVRKTNKRLNEEVEDMFRRAKT

SEQ ID NO: 18797 - protein, 57 aa, Artificial Sequence
  Synthetic
DEARELLRDDERLNRELNDLDRDSSKKDEDLNRKLNEDDKESVERADTLLERIKREV

SEQ ID NO: 18798 - protein, 56 aa, Artificial Sequence
  Synthetic
RELIRELEERNRDSVRKSRKSNEDNERTNRESIERSRRSNEELRRRAEELIKDLRR

SEQ ID NO: 18799 - protein, 57 aa, Artificial Sequence
  Synthetic
SEVEELLERDKDLNRRVNELNEKTSREDEKLNDEINKRIDRLVERARELLERIRREV

SEQ ID NO: 18800 - protein, 56 aa, Artificial Sequence
  Synthetic
ERLIRELEERNRESVERVRRSLKENEDRNRESKKRLEDLLREVKRLMDKLEEDLRK

SEQ ID NO: 18801 - protein, 57 aa, Artificial Sequence
  Synthetic
SEVEELLERDKRLNDEANRLNRELVERDKRLNEELNKELKRMADEIKRLLEEIRRKV

SEQ ID NO: 18802 - protein, 56 aa, Artificial Sequence
  Synthetic
ERLIEKLERENRESEKRARDSNKELEKRNRESEDRARRILKKLEDDVRRLKKELET

SEQ ID NO: 18803 - protein, 60 aa, Artificial Sequence
  Synthetic
SELEKVRTDVERVIRELEKELKEIDEENKKVNKDVEEEVKRIEEENKEMNDRLDDLRRRG

SEQ ID NO: 18804 - protein, 56 aa, Artificial Sequence
  Synthetic
SKEMEEVREELERLLRRIKKILEELRDENRKSLERLEDVLRRLEKRNRDTLEEVKR

SEQ ID NO: 18805 - protein, 60 aa, Artificial Sequence
  Synthetic
KETEDVERDVERVIREIDTKLKEIEKKNDKANKELEEKLKKIEEDNKRVNERLKRLREEG

SEQ ID NO: 18806 - protein, 56 aa, Artificial Sequence
  Synthetic
SEEMRRVREEAKRLLDKVKKILRDLERRNEEVLKKIKDIMRRLEKRNRDTLEEIRT

SEQ ID NO: 18807 - protein, 60 aa, Artificial Sequence
  Synthetic
SEEEKVLEEVKRAIDELKKELEEVEERNKRVNDDIRRLTDEIRKENKTANDRLRKLLEEG

SEQ ID NO: 18808 - protein, 56 aa, Artificial Sequence
  Synthetic
SKKLEEVRKEVKRLKDEVEKILKDLRKRNKDLLEEDKRVLDRLRETNEKTLDDVRR

SEQ ID NO: 18809 - protein, 61 aa, Artificial Sequence
  Synthetic
KEEEDITRRIDKILRDLREKLRDVNRRVEELSKRLHDKLEKVLKRIKDEAERLRKEIREKL

SEQ ID NO: 18810 - protein, 55 aa, Artificial Sequence
  Synthetic
KELEDKVEKDARDVERHIRKDLTDVRRRHEDLDRKIKELLDRVRKAIRDVEEKIK

SEQ ID NO: 18811 - protein, 61 aa, Artificial Sequence
  Synthetic
SKAEELLRRVEELLKRVKDKVDDIVRKIEKSNRDLERRDEEVLREVEETNRRLEEELRRRG

SEQ ID NO: 18812 - protein, 55 aa, Artificial Sequence
  Synthetic
EEVLRRLEELIRRAERKLEKMLEDLTRLNKEWEDRTRKLLEDLRRINEEIKRKIK

SEQ ID NO: 18813 - protein, 61 aa, Artificial Sequence
  Synthetic
SEKDELLRDVRRLLKEVEKELEEIRRRVTESNRELEKLVREVLEESKRSDDKLREDLERAG

SEQ ID NO: 18814 - protein, 55 aa, Artificial Sequence
  Synthetic
KDLLERLKELIKRLKDKLKEIADRLRRINEDIERKIREILEDSRRFNEEIKKKID

SEQ ID NO: 18815 - protein, 58 aa, Artificial Sequence
  Synthetic
STLETLEDEVRKIVTDIERVIRESNKHLKKSIDDVERVIEEIERRAREIVKKVRDVIS

SEQ ID NO: 18816 - protein, 58 aa, Artificial Sequence
  Synthetic
EKLERILREIKRIVEDLKKKVEDSLKRYEEELERLKEDLRRLLKRIRDEVEELKKESD

SEQ ID NO: 18817 - protein, 59 aa, Artificial Sequence
  Synthetic
DEEEKLRDEVEKIVKKIEKAIEDLRRHAEKSVTDIRKVLKELEDHIRESVKDAERFISE

SEQ ID NO: 18818 - protein, 58 aa, Artificial Sequence
  Synthetic
EKLEKILREIERIVEKLKEDLDRLLKRYEDELRRLKEELERILDTYRRLLEELERRLR

SEQ ID NO: 18819 - protein, 58 aa, Artificial Sequence
  Synthetic
DTARELEREVKKIVDEIEDVIRRLRRHIEESVKRAEKVLREIEKHARESAKRIADVVS

SEQ ID NO: 18820 - protein, 58 aa, Artificial Sequence
  Synthetic
EELKEILERIEEIVKRLEEELRRLLEEYKKRIEELAKRIKEVLDEYRKILKRLEDETK

SEQ ID NO: 18821 - protein, 60 aa, Artificial Sequence
  Synthetic
DEAEELRKDVKRVLDEIKKRHEELLRKVREDLDRIRRKLEELAKRHRELLKEVKKIVDRD

SEQ ID NO: 18822 - protein, 56 aa, Artificial Sequence
  Synthetic
DKIRREIDELIKKLEEESRRIEEEIKKLVEDLKREADKIMEELERETDKLKKELDK

SEQ ID NO: 18823 - protein, 57 aa, Artificial Sequence
  Synthetic
SEKEKILEEIREVLKRILDRLKKELEDDKKSLDDNKRRTEEALREDKKSLEEIRRAN

SEQ ID NO: 18824 - protein, 56 aa, Artificial Sequence
  Synthetic
DKILRDLEKALDKLRRDIEEILKRSRDLNKKLEDDNREALRRSEELNRELEERERK

SEQ ID NO: 18825 - protein, 57 aa, Artificial Sequence
  Synthetic
SEEERIRREIKKILDDIKEEAERRLEEDKKSLDENRKKTEEVLKKIRDDLKRIEEAK

SEQ ID NO: 18826 - protein, 56 aa, Artificial Sequence
  Synthetic
DEILRRIEKLIEDLKRTIDKILEDSERLNRKLEKENREALKELRDLLRELEERLKK

SEQ ID NO: 18827 - protein, 56 aa, Artificial Sequence
  Synthetic
EELERILRKITEMLREIARKLKKLLEDDKESLDRNKEKTEDDLRRDKESLDRLRKS

SEQ ID NO: 18828 - protein, 56 aa, Artificial Sequence
  Synthetic
DKILRDLEELLKDLERKIRRILDESRKLNDELRKENKKAEDTSRRLNEELEERLRT

SEQ ID NO: 18829 - protein, 56 aa, Artificial Sequence
  Synthetic
SELEEILKRVEDVLRDILRKLKEVLDRAEKVIRDNKRKTKKMLDDDKRSLDEIRKA

SEQ ID NO: 18830 - protein, 56 aa, Artificial Sequence
  Synthetic
DKILRELEKRLEDLRKRIKDILDDLKRKLEELKRENEKFLRRSKKLNEDLERELET

SEQ ID NO: 18831 - protein, 56 aa, Artificial Sequence
  Synthetic
DELEEIRDRIKRKLEKLKEETKRTLEEDRKSLDDNRRKTEEALRRDRESLERIERA

SEQ ID NO: 18832 - protein, 56 aa, Artificial Sequence
  Synthetic
RDILEELTRLLDKLRRDHERVSEESKRRNDELEEENRRVLKESEDRNRELEERLRQ

SEQ ID NO: 18833 - protein, 55 aa, Artificial Sequence
  Synthetic
SELEKLLDDVKKDLKRIEEHLRRDEEDSKRRIEELERHLERDKKEVEKAIRELDK

SEQ ID NO: 18834 - protein, 56 aa, Artificial Sequence
  Synthetic
EKVVRTIEKLLTDLERKIREIEKRSKELLTRLEEKIKKAERESRKLLRELTERIDR

SEQ ID NO: 18835 - protein, 61 aa, Artificial Sequence
  Synthetic
DELKKLLDDVREVSKRLNDELRKIMEEIRKVSEDLNKELDDIVRKIKKVIDDISEKIKRDG

SEQ ID NO: 18836 - protein, 55 aa, Artificial Sequence
  Synthetic
EEIEKEIRELLKENRRRADEIRRRAEKSLKDNERRVEKVEREAERLLREIEKELK

SEQ ID NO: 18837 - protein, 61 aa, Artificial Sequence
  Synthetic
SELEKLAEDVKRKLTEIREKIKKLLKETRDVSRELNKELEDLLRRTTEVIDEIRKKIEKEG

SEQ ID NO: 18838 - protein, 55 aa, Artificial Sequence
  Synthetic
EDIKKEIEDLLRDLERLLRDVNREVEELLKENRKRLEEINRTVERLLEEIEKRLR

SEQ ID NO: 18839 - protein, 61 aa, Artificial Sequence
  Synthetic
SELEELVRRLREVSKRLNEELDRILDRTRRLAERISEDIKRLADETKEVIERIKEEIKKKG

SEQ ID NO: 18840 - protein, 55 aa, Artificial Sequence
  Synthetic
EEIEKEARELLRDNRRRIEEINREVEELIRRLEKLLKEVNETVKRLLEEIRKDLD

SEQ ID NO: 18841 - protein, 61 aa, Artificial Sequence
  Synthetic
SELEKLMKDVKEVIDEIRKKLRKILEDTTRVAKRNEEKLKRIADEAEKVIREIRDEIEKKG

SEQ ID NO: 18842 - protein, 55 aa, Artificial Sequence
  Synthetic
EEIKKRIDDLLRRIEKEIEEINRRVEELHKRLEDLHKEIEDKVRELLTRIEERLK

SEQ ID NO: 18843 - protein, 56 aa, Artificial Sequence
  Synthetic
SEVEEILERIERLIRDDNRKLKDVERRNRENIKEDNERLKRMMEELKKIADEIRKA

SEQ ID NO: 18844 - protein, 55 aa, Artificial Sequence
  Synthetic
DSIRRTVEKLLEDNRRRNEEILKESEDLLRKNREKTKEIVERAERLLDKLRRERK

SEQ ID NO: 18845 - protein, 57 aa, Artificial Sequence
  Synthetic
DEAEELKERIERLSRRIDEEYRRLLEDYERLLRELEKKIEDLKRELEKLVEELRREG

SEQ ID NO: 18846 - protein, 55 aa, Artificial Sequence
  Synthetic
EELKEKVKEIVKRSEEDIRRLKKHLDESIRTAEEVIRRLREKIKRIIDTVRDAKR

SEQ ID NO: 18847 - protein, 57 aa, Artificial Sequence
  Synthetic
SELEELEKRIRRLSEEIKKLLDDLRREYEELVKELRRRLEELRKEIERLSEELKAEG

SEQ ID NO: 18848 - protein, 55 aa, Artificial Sequence
  Synthetic
DEMREKVDEIVKRSRDVIKELREHIEESIRRAEKVLRDLEREVRKIIEDARERTR

SEQ ID NO: 18849 - protein, 56 aa, Artificial Sequence
  Synthetic
REVDELRKEIERLSRKIEDDLKKLEDRYEELLEKLERDLEKLKEDYDRLLRKLEED

SEQ ID NO: 18850 - protein, 55 aa, Artificial Sequence
  Synthetic
EKAEEDVRRTVTESKKVIDELREHIKKSIREVEEAIKRLREHVERSIRRAEEATK

SEQ ID NO: 18851 - protein, 60 aa, Artificial Sequence
  Synthetic
SEEEKLDEDLERLREEIRELHRELEELIKKLREEVRRIIEKVRTHLKRDRDRAKEVIEKV

SEQ ID NO: 18852 - protein, 55 aa, Artificial Sequence
  Synthetic
ERMREKLEKIKKDVDKLSKELHDKLDKVLKEIEELLRDVKRAIKKVNDDIKERLR

SEQ ID NO: 18853 - protein, 61 aa, Artificial Sequence
  Synthetic
DEIRELVRRFEELVRRNVEHLKKLLRDAEKLVKENEKHLEDLLREIEETVKRLLDKIRREG

SEQ ID NO: 18854 - protein, 59 aa, Artificial Sequence
  Synthetic
KDKARDVEKRIEDLNREIKEIIRRVEERLKELNKRIEKLLEEVRDTLRRLKEELDRAMT

SEQ ID NO: 18855 - protein, 61 aa, Artificial Sequence
  Synthetic
SEIEELLKEVERRVRENKKHLKRLLEDIKRLVERNAEDLERILRDAERIVRELIKKIRRDG

SEQ ID NO: 18856 - protein, 59 aa, Artificial Sequence
  Synthetic
KDKLRRIEKALEDLNREIEEILRRVKEEIERLNREIEELLKRVEEELKRLEKELEEELK

SEQ ID NO: 18857 - protein, 61 aa, Artificial Sequence
  Synthetic
SEIEELLKEVRKRVKENAEDLKRLLDEAKKLADDNVKHIEDLIREVEDIIRRLKERIKRTG

SEQ ID NO: 18858 - protein, 59 aa, Artificial Sequence
  Synthetic
KDKARRLREELRKLNEDIERLLKRVEDELRKLNKKIKDILEEVEEVLERLLRELREEER

SEQ ID NO: 18859 - protein, 63 aa, Artificial Sequence
  Synthetic
REKEELKKELKKLIEELKRSHDELKEELKRLLKRIEDILRENRKTTEDLSRELKKLLEELRKK

SEQ ID NO: 18860 - protein, 59 aa, Artificial Sequence
  Synthetic
REELKRLLEELRRMIKELKDRNRKALEELEKVIREIEEEIKDINRRLREEIRRLEEEAR

SEQ ID NO: 18861 - protein, 63 aa, Artificial Sequence
  Synthetic
SKEEELRETLKRLVDEIRRMLEEDRRSDEELVRRIERVLEEDKREDDRLHKRLRDELRRLRKD

SEQ ID NO: 18862 - protein, 59 aa, Artificial Sequence
  Synthetic
EDELRRLLRELEEMAKKLEKELRDNNRDLRRVAEELKELIDDNTRKLKEVIEKLEREIK

SEQ ID NO: 18863 - protein, 63 aa, Artificial Sequence
  Synthetic
SEKETVRDELRKLVETIRKLLEEDKESDKRLADRIRELNEENKEDTERLIRELEKVLEELRKK

SEQ ID NO: 18864 - protein, 59 aa, Artificial Sequence
  Synthetic
EERLRKLLERLERVIRDLLRKIEENNKRLRKAIKELLDELRKINKELREVIKKLLDDAR

SEQ ID NO: 18865 - protein, 63 aa, Artificial Sequence
  Synthetic
SEKERLKEELEKLSKEIEDILRDDKRSDDELRRRLRELLEKDRREDERLNEELKRMLEEARKR

SEQ ID NO: 18866 - protein, 59 aa, Artificial Sequence
  Synthetic
EELLRRLLEKLKRMAEKLKRDIEDNNRKLRKVATELAKEIEDNSEKLREDAKRLSEKIK

SEQ ID NO: 18867 - protein, 63 aa, Artificial Sequence
  Synthetic
DEEEELRKRLEKLSKEVRELLRRDEEEDRRLNRELEELLKDHERTVRDLSREVEDLLRKARRK

SEQ ID NO: 18868 - protein, 59 aa, Artificial Sequence
  Synthetic
EDELRELLRRLEDVIRKLAEDLKRNTEDLRRVIKELAERLEELNKRLKREIRRLKEELR

SEQ ID NO: 18869 - protein, 60 aa, Artificial Sequence
  Synthetic
EKSERLRERLRDLLRKHKELLDRNEKTLEEAERRVEKLLEDNERELKKIEDEVRELLKRL

SEQ ID NO: 18870 - protein, 55 aa, Artificial Sequence
  Synthetic
KEILREIEERFKRLAEDLKRSNDKVRELVDKAEKDIRKSNEELRKLARDVRERVR

SEQ ID NO: 18871 - protein, 60 aa, Artificial Sequence
  Synthetic
SDEDRLRELLRKLREDHERIVRELRKRLEEVLREIERLLKKNEEDLERIRREVEELLKRI

SEQ ID NO: 18872 - protein, 55 aa, Artificial Sequence
  Synthetic
EDIEREIRDTLRRLREDLERIKEDVERLRREIKKRIEDSNRKVRDLLRRVKEAVR

SEQ ID NO: 18873 - protein, 60 aa, Artificial Sequence
  Synthetic
DEERKLEKSLKDVEDTHRRLLEKNDEDLKELRKRVEDMLRRLEDALRRILEDIEEKLKRI

SEQ ID NO: 18874 - protein, 55 aa, Artificial Sequence
  Synthetic
EKILREVEDLLRKVAEDLKRSNDEVKELAERLEETIRDLLRRIEEILKEIEERVR

SEQ ID NO: 18875 - protein, 60 aa, Artificial Sequence
  Synthetic
KDEERLKRFLEDIRRRHRELLERNERALDEIRRRHEELLRRNEEAIKDIERRVRELLKRL

SEQ ID NO: 18876 - protein, 55 aa, Artificial Sequence
  Synthetic
EEILKEIEELLRRLEENLRRNHKEVRELLEKVRRNIEENHREVRRLLEEVERRAR

SEQ ID NO: 18877 - protein, 60 aa, Artificial Sequence
  Synthetic
DEEETLEDVLRELEERVEKLLRDLTRDLERVEKEHKELLKRNKEAIDEIEKRIEELLKRI

SEQ ID NO: 18878 - protein, 55 aa, Artificial Sequence
  Synthetic
DEILRKIEELLRRAEEVIRDLERKVRKLERDIRENIKKNHREVREILRKIEEDVR

SEQ ID NO: 18879 - protein, 57 aa, Artificial Sequence
  Synthetic
KDEERLRELIKRINTEVKKSLDENKERLDKVEEDIRRSLKENEDRMERVRREVEKAN

SEQ ID NO: 18880 - protein, 56 aa, Artificial Sequence
  Synthetic
IEEIKKRLEDILEETRDMSRRLNEELRRILERVKEVSKELNRELEEILKRVEDARR

SEQ ID NO: 18881 - protein, 57 aa, Artificial Sequence
  Synthetic
SEKEDLERELEEVRRRVEESLRKNEEDVKRVRDELKKLLDENRKELERIRREVERAN

SEQ ID NO: 18882 - protein, 56 aa, Artificial Sequence
  Synthetic
MEEIKKEIEKILRDIERVSRELNKKLEEIVRRLKKVSDELNRRIEEIAERVRRRRK

SEQ ID NO: 18883 - protein, 56 aa, Artificial Sequence
  Synthetic
KDEERLDEELKRVNDEVRRLLARNEETLERIEREVKRLLDENEKRAEDIRKEVEDS

SEQ ID NO: 18884 - protein, 56 aa, Artificial Sequence
  Synthetic
IEEIEKTIREELKETRKVSEELNRELERILRELRKVSEELNKDLEKILRRVKKERK

SEQ ID NO: 18885 - protein, 56 aa, Artificial Sequence
  Synthetic
SEEERLREILKDINRRVEELLKENEERMERIREELEELLERLKEELERIRKRVEEE

SEQ ID NO: 18886 - protein, 56 aa, Artificial Sequence
  Synthetic
VEEIEKDIRRLLRETERVSEELNKKLEEIARELREMIKEIKERLKRILEEVEKRRR

SEQ ID NO: 18887 - protein, 56 aa, Artificial Sequence
  Synthetic
SEEDELRRLLKEVNERVERLLDEIRKELEKIAEELRDLLKKNEDKLREIKRRVEEN

SEQ ID NO: 18888 - protein, 56 aa, Artificial Sequence
  Synthetic
TEDIAREIRELMERTRRVIEEIKKELRDILEKLRRVSEELNKKLDEILKRIEDRTR

SEQ ID NO: 18889 - protein, 60 aa, Artificial Sequence
  Synthetic
REIEKLIRDYRRILRELSEKIRRLAEEHEDIVRKLIETLKRLIDEIRKIMEDLSRLLRRD

SEQ ID NO: 18890 - protein, 59 aa, Artificial Sequence
  Synthetic
KKLMDELRRVSEEVNTRLEKLLRDLEKKLRDSEERAKELIRRIEKTLEDIDRRLKEEEK

SEQ ID NO: 18891 - protein, 61 aa, Artificial Sequence
  Synthetic
RELEKLMEDAERYAKRSMEAFEDLIRKHDELLKRLEKKLRDLIKRIEKLLREIKEKIERTG

SEQ ID NO: 18892 - protein, 59 aa, Artificial Sequence
  Synthetic
EELLKRAKELIETIEERSKRVVDENKRVVERSRRRLKKLLEDIERVLERIERRLTEAKK

SEQ ID NO: 18893 - protein, 61 aa, Artificial Sequence
  Synthetic
SELEKLLEDIERYVKRSKEKARELIKRHKEYVRRSEERLRRLIEKLEKLAEKLKELIRRTG

SEQ ID NO: 18894 - protein, 59 aa, Artificial Sequence
  Synthetic
DSLLKEVEDLLRKVEEESRRVIEENKRVVEESRKRSERLLREIEKELRRVEKEFRDEKR

SEQ ID NO: 18895 - protein, 61 aa, Artificial Sequence
  Synthetic
SELEDLMRDVKRYADESARRIEEIIKRHRKLVREISKKIEELIRELRKLIERILELIRRDG

SEQ ID NO: 18896 - protein, 59 aa, Artificial Sequence
  Synthetic
EELLDRARKLIREIEERSKELSKRNKEEVDRSEERIRRLLKRAEEELRRVREELKEASR

SEQ ID NO: 18897 - protein, 56 aa, Artificial Sequence
  Synthetic
SREEEIRELLKRSKESLEKLLRELDKEHKESEKSARELLKRNEKRLREIREEIRRL

SEQ ID NO: 18898 - protein, 59 aa, Artificial Sequence
  Synthetic
EEVMKRLLKEIRDVNKEITERLEEHRKRLEEINRDVERIIRELNEEHKEVLKRIREKAK

SEQ ID NO: 18899 - protein, 60 aa, Artificial Sequence
  Synthetic
SEREELRKLLRRIEEEAKRLLEELKRTTDDTRRENEELLRRLEELSKETKKRVEDLLREL

SEQ ID NO: 18900 - protein, 56 aa, Artificial Sequence
  Synthetic
VKDVLKKLEDVLRELKKAVEKIKRDNKRAVDENRELVERIMKENKDAMKKLEEDVR

SEQ ID NO: 18901 - protein, 60 aa, Artificial Sequence
  Synthetic
SEREELRDLLRRIKEDAERLLKEHRDLLEEVRKEVEKLLRELRKLSKETEDEAERLLREL

SEQ ID NO: 18902 - protein, 56 aa, Artificial Sequence
  Synthetic
IKDVLKKLKEVLKKLRDDVEKSKRDTKRVLDRLRDTVRKIMEENRRALKEIADEVK

SEQ ID NO: 18903 - protein, 60 aa, Artificial Sequence
  Synthetic
DDEERLREEVERVERTVRDLLRRLRELTKKTDEDNRKLLKEHEDLLREVVKRVTDLLKDL

SEQ ID NO: 18904 - protein, 56 aa, Artificial Sequence
  Synthetic
VKDVLKEIKEVLREVTERAKEIADDNRRALEENEREVKRSKEDTKRALRKLEEEVK

SEQ ID NO: 18905 - protein, 56 aa, Artificial Sequence
  Synthetic
SSSEELEKLLEEVRRELRRLAEEVKRLNEEIDKDIDRLAEENDRLHKEVKKDLDRL

SEQ ID NO: 18906 - protein, 59 aa, Artificial Sequence
  Synthetic
EEVVKRILDEIRRTLEEIKEIARRYLEKNKKEMREIRETMKRDNDHLEDLLRKIRETAR

SEQ ID NO: 18907 - protein, 56 aa, Artificial Sequence
  Synthetic
SDEERIRKKLREIEERHKKLSEELKELLRRSEESVRRLLEKNRKDLDEVRKRIEDL

SEQ ID NO: 18908 - protein, 55 aa, Artificial Sequence
  Synthetic
EEVERRLDRLLDESRRLAEELKERIKRVNKRARELVRESEEHLRELLEKVERDAT

SEQ ID NO: 18909 - protein, 56 aa, Artificial Sequence
  Synthetic
SDKDELKTRLDRVREIIERLARESEELHKELKKRLEDLKRDSERLHRKNLEDIRRS

SEQ ID NO: 18910 - protein, 58 aa, Artificial Sequence
  Synthetic
EVTDRIREDIKRVIEEVRRLAEEDKESVKEILKKIEKLADEDRRSVEKNHKEVEDTRR

SEQ ID NO: 18911 - protein, 58 aa, Artificial Sequence
  Synthetic
RDEERAEELLKEIKDTVDELKKEVEKVLDESRKRDKKLNDELRKLLEDSRRTIERDVR

SEQ ID NO: 18912 - protein, 55 aa, Artificial Sequence
  Synthetic
DKLLEELRKILEELRKKVKDLIEEHRRLVKTSADRVKRLLDEHRRILKELKDRRK

SEQ ID NO: 18913 - protein, 61 aa, Artificial Sequence
  Synthetic
DEAEELIKRIEDLLRELARRMEEILRRHEEYVKKSAEDVKRLLEEVEKLADDLRREVERDG

SEQ ID NO: 18914 - protein, 59 aa, Artificial Sequence
  Synthetic
EEVARKIEEVLRRVKEELTKLVEENERKLRESRERSKKLAKEVEDLLREIKRRVEELER

SEQ ID NO: 18915 - protein, 56 aa, Artificial Sequence
  Synthetic
SERETLEELLERVERLLEKLKRELDEAHKKNKEDLDRLRDKNRKRLEDIKRTIDRI

SEQ ID NO: 18916 - protein, 55 aa, Artificial Sequence
  Synthetic
EELLKELKEVLERIRKEVEKLLRTLEEINKTTRKLVEETNEKADRILEKVKRDAK

SEQ ID NO: 18917 - protein, 56 aa, Artificial Sequence
  Synthetic
SEDEKMEELIKRSEDKLRKLEEDVRRLLEEIRRRAEDNTRRNERTLREIERTLREI

SEQ ID NO: 18918 - protein, 55 aa, Artificial Sequence
  Synthetic
EELVRELEKIDRETTEVVKKLLEELKDIMRRVHERSEESLREAKKILREVEERAR

SEQ ID NO: 18919 - protein, 60 aa, Artificial Sequence
  Synthetic
SEEEELDKLLKEVREKDERLKREVEELLRRIKKRLEELKRENDELLKEVREVLKKLAKET

SEQ ID NO: 18920 - protein, 56 aa, Artificial Sequence
  Synthetic
VEDVLRRIEEVARRIERLYEELLKKLRDVVREIEKRVREHNEDVKRVVREIEKRIK

SEQ ID NO: 18921 - protein, 56 aa, Artificial Sequence
  Synthetic
DEVEKVKEEIKRLNEDVRRLVEEYRKRLEKLNRDHRDYVKKSEKRIRDLIREVRRR

SEQ ID NO: 18922 - protein, 59 aa, Artificial Sequence
  Synthetic
EDATREIDKALEDHRESVERLVRELERLNEENRKSVKKSEEDSRRLLEEVRRELRRKRK

SEQ ID NO: 18923 - protein, 58 aa, Artificial Sequence
  Synthetic
DEEERVEELLRRDRESDKELRERLRKLNEENRDETEKLIRELEDSLRRLKEELEKKGK

SEQ ID NO: 18924 - protein, 55 aa, Artificial Sequence
  Synthetic
KELEKELRDNNRRLEEVIRRLEEELKRISEELRKVIKKLKRDNEEKLRRLDEATR

SEQ ID NO: 18925 - protein, 60 aa, Artificial Sequence
  Synthetic
DEEERVKDINRRNEEDSRRLERRIRELNRENRKSSKELADRVRELLKRAEERLRTEGKDK

SEQ ID NO: 18926 - protein, 55 aa, Artificial Sequence
  Synthetic
EELVKKLEDINRRLREAIKRLEDTIREINKELRKKIKELLDRLKEIVKRLEDRAR

SEQ ID NO: 18927 - protein, 58 aa, Artificial Sequence
  Synthetic
SAEERIKRINKKNRDDSEKLKRRIEESNRENKRSSDELVKRLEELLRKLEEDLKRKGK

SEQ ID NO: 18928 - protein, 55 aa, Artificial Sequence
  Synthetic
KELEKKLRKINEDLKRAIRKLEEDNKRANEELKKRAEDLLREIEEIIRRLEERTR

SEQ ID NO: 18929 - protein, 58 aa, Artificial Sequence
  Synthetic
DEERRAEEINRRNKKDSDRLAETIEKILKEDEDRDKELHDRLEEILKELRKRLEEEGK

SEQ ID NO: 18930 - protein, 55 aa, Artificial Sequence
  Synthetic
EELVKELEKINEELRRDIKRLIDEIRENTERLERMIRELEKKIRKILKELDDRAK

SEQ ID NO: 18931 - protein, 55 aa, Artificial Sequence
  Synthetic
DLEKELTDLMKKHAEENDRLRRRLEELLKRHAEENDRLRDRVRRINEEVEEILRR

SEQ ID NO: 18932 - protein, 59 aa, Artificial Sequence
  Synthetic
EDVIREALERIKRISDESKRTIDEVVKEIEKITKESRDLITKYERDVERSIEEAERRAT

SEQ ID NO: 18933 - protein, 60 aa, Artificial Sequence
  Synthetic
SLEERIRELLKRHEDLTRKLKKENDESLRRHRELTKKLRKELEELLKRAEDVLRDLEREG

SEQ ID NO: 18934 - protein, 59 aa, Artificial Sequence
  Synthetic
AREVDDLLRKIEDISKKSADRNRELNEELEDISRRSKEEMKKLLDELRRDVEEIKKRTK

SEQ ID NO: 18935 - protein, 60 aa, Artificial Sequence
  Synthetic
DLEDRIRRLLEESKKNLDELKRRNEESLKRSEDLLKDLKRKLDDLLRKAEEVLRELRKRG

SEQ ID NO: 18936 - protein, 59 aa, Artificial Sequence
  Synthetic
ARDVDRLLEDVKRISDTVHKRNEELNRRLREISERAREAVEDLLRRLEEIVRRIKTRTE

SEQ ID NO: 18937 - protein, 60 aa, Artificial Sequence
  Synthetic
EEIERILEKLRRDLEEVRKKVKKVLDELRELTEELKRKVEKVLRELKRLSEEIARRVEKG

SEQ ID NO: 18938 - protein, 55 aa, Artificial Sequence
  Synthetic
RELRTVAREIREELKKLREELDKLLREHRETSKELEKRLKEVLDRHRELSDRLRR

SEQ ID NO: 18939 - protein, 59 aa, Artificial Sequence
  Synthetic
DELREMIRKVREINERSKDEIRKILEAIKKIVEDHRRVVEKLLRDLKDIVRRARETRSR

SEQ ID NO: 18940 - protein, 59 aa, Artificial Sequence
  Synthetic
EEARKRLEDLSRENKRSLDELRKRIDDILDENRRAVEESRERAKRVLDEVRETLKRDEK

SEQ ID NO: 18941 - protein, 60 aa, Artificial Sequence
  Synthetic
SEVDEVEKRIREAIKRHRDRVKKIIDEIKKLLDDHRRRVKKLEDDLKKRADDVRKETKDG

SEQ ID NO: 18942 - protein, 59 aa, Artificial Sequence
  Synthetic
KEARDRIRELLKKYEDDLRRSEKEIEDILRRYERELRESEKRMREVLKRLEDELRRAEK

SEQ ID NO: 18943 - protein, 60 aa, Artificial Sequence
  Synthetic
DEVKEVEKKIRKVLREHKKLVEELIRKIKEMIDRHKEIVERIIRTIRRELKRAEELARKG

SEQ ID NO: 18944 - protein, 59 aa, Artificial Sequence
  Synthetic
EEMEKRIEDLLREYREELERSRRELERLLEEYEKVVDESRKRIKTILDEVEKLLRDLDR

SEQ ID NO: 18945 - protein, 56 aa, Artificial Sequence
  Synthetic
SSRERFKELSDRNKEVVERSRRRLEKLLEENKREVEKSKKRIEDMLRKADDLLRKL

SEQ ID NO: 18946 - protein, 55 aa, Artificial Sequence
  Synthetic
ERLSEEIKRLIETHEKLLRELEKKIRDLIRKHREDVERIIKEIDKLLKKIDEDTR

SEQ ID NO: 18947 - protein, 57 aa, Artificial Sequence
  Synthetic
SEEETLDELNRENEELLRRSKERLDRSHEKLKKILDDISERVKELLKRAEKLLRDEN

SEQ ID NO: 18948 - protein, 56 aa, Artificial Sequence
  Synthetic
KDRVSDRIRRLLEEHERVVRELLESNDRMAERLRRVAEELVKEIKKELDDLRRRTT

SEQ ID NO: 18949 - protein, 56 aa, Artificial Sequence
  Synthetic
SEEETLERLLRKNEEELKKSKERLKELNRTNRKELRDSERRIKRALEEVEDLIRRE

SEQ ID NO: 18950 - protein, 56 aa, Artificial Sequence
  Synthetic
KDEVTKTIERIIEEHRRMIEELIKEIRKLIKEHRDKVRELLKRIKDILRRLKEERR

SEQ ID NO: 18951 - protein, 61 aa, Artificial Sequence
  Synthetic
SLDERIDELRRTLEEMLDRIRRSNEEVLRDSRRVLEEIDERARRVVEEAEKLLREIDKRKG

SEQ ID NO: 18952 - protein, 59 aa, Artificial Sequence
  Synthetic
EEDIKRLLEKVREIIEELKRRNDELNKRIKDLSEEMRRRVKKLLDEIKEDLERIKRRAD

SEQ ID NO: 18953 - protein, 61 aa, Artificial Sequence
  Synthetic
SLEEEIKELIKRAEEVLERLARSNKEVLDRSRKVLKELRETNKRLLEELKRALDKIRKDKG

SEQ ID NO: 18954 - protein, 59 aa, Artificial Sequence
  Synthetic
EEDIKRLLEEVERIIRKLAEENKKLNKEIEDLSRRARERNERLLREVEKIIRDIRERAR

SEQ ID NO: 18955 - protein, 58 aa, Artificial Sequence
  Synthetic
SEVEELTKKAKKIIEDHRRYVEKSARDVERLIREHERYVEESAKKVEKLLREIKELDK

SEQ ID NO: 18956 - protein, 56 aa, Artificial Sequence
  Synthetic
KDKIRELERENEEVIKESRERSERLARKNKKVLEDSERRSRELSERVERLLDESRR

SEQ ID NO: 18957 - protein, 56 aa, Artificial Sequence
  Synthetic
REEDVLRKLEKEIRDLLERIKRKSEELIERNKRTNDDIRRRSKETIDELRELTKRV

SEQ ID NO: 18958 - protein, 56 aa, Artificial Sequence
  Synthetic
DEDIRREAERLLREMEKRAKENEEDVRRNLKRLRDALKEHKEKVEKLLEEIKKDAK

SEQ ID NO: 18959 - protein, 56 aa, Artificial Sequence
  Synthetic
SETDDIIRRIRRLIEELLRNSKRTSDDNRRTLEELERNSERAIKKIKDVLEKLSRD

SEQ ID NO: 18960 - protein, 55 aa, Artificial Sequence
  Synthetic
EKAEKIRKELEDMARESRKLMRENKREVDRVEKKSRKLLKDILDEIDKVDEDEKR

SEQ ID NO: 18961 - protein, 57 aa, Artificial Sequence
  Synthetic
SEAERIAREVERVLREIEEEVKRLSEENRELVERIERESRKSIEDIERRLEEVKRKV

SEQ ID NO: 18962 - protein, 56 aa, Artificial Sequence
  Synthetic
RRLLEALRREVEEVLKRIRETLEENRRRNEEVLRRDKELLERIRDKIRRVLEELKR

SEQ ID NO: 18963 - protein, 60 aa, Artificial Sequence
  Synthetic
DEERELRKLERELEDVVRKDRKILEDLRRTLDTVRREDERILRELEETLKEVVKRVREKG

SEQ ID NO: 18964 - protein, 56 aa, Artificial Sequence
  Synthetic
IRRISEEAKELLKRWEDESRKVEEEHRRSLEEWRERSERIAREHKKSLEKLEKDVE

SEQ ID NO: 18965 - protein, 56 aa, Artificial Sequence
  Synthetic
SIEELLKKLEEDIERVLRKSEELLKRNEEENKKVLDESKRLLDELKKRAEKVLREL

SEQ ID NO: 18966 - protein, 59 aa, Artificial Sequence
  Synthetic
EEVLKEIVKRVRDDIERHDRESKKLSDENKRVVDEHRKRSEELARKLEELLREIRERVT

SEQ ID NO: 18967 - protein, 59 aa, Artificial Sequence
  Synthetic
SDIEKLAEEVDRLNKELTDRLERLREEHKRTLDEIRKTLEKLKREVDKELEEVKKIVKD

SEQ ID NO: 18968 - protein, 59 aa, Artificial Sequence
  Synthetic
ERVKKILDDLKRKNEENDERVERIMRELRERNRKLNEEIDKIVEDIRREVEKVSREARR

SEQ ID NO: 18969 - protein, 59 aa, Artificial Sequence
  Synthetic
DAVDRVREENKKDSERNKKRVEDVKRRAEERSRRNKKKVKELRDRNREEIKRIKELKDR

SEQ ID NO: 18970 - protein, 56 aa, Artificial Sequence
  Synthetic
RKVEEESRRSFKRNKEENKKVRDEIKKTIEENEAENRKAHEDSKRSFEELEDELRK

SEQ ID NO: 18971 - protein, 60 aa, Artificial Sequence
  Synthetic
DKEREATRRLRELEKENTKLVKEIRDADREIEKRLREIHKKLEDENRKLEEEIKDMVRRK

SEQ ID NO: 18972 - protein, 54 aa, Artificial Sequence
  Synthetic
RIVEEVKKHHERNERRLREYLDESRKYLEDHIRRLEKYLEDSRRLATRIKEETK

SEQ ID NO: 18973 - protein, 57 aa, Artificial Sequence
  Synthetic
SSVEEVKRKNEKSLREIERASEEHLERLKRELEKSEDEARKHNKKLDDDLERLERKG

SEQ ID NO: 18974 - protein, 58 aa, Artificial Sequence
  Synthetic
ERVKDLERTHEESKRRVEELMKENDDLLKRIEEESKRLNEENERKVEDIEKKVEDLKR

SEQ ID NO: 18975 - protein, 59 aa, Artificial Sequence
  Synthetic
SEIERVAKELKDEADRLRKEVEKHRRRSKEELDRLREESKKVNEDLKRMLERIREIAAQ

SEQ ID NO: 18976 - protein, 58 aa, Artificial Sequence
  Synthetic
EEFKKLRDLIEDIKRRLEELVKALEETNKKIEDDVRDSVRKNRETLERIKKEIEDTAT

SEQ ID NO: 18977 - protein, 61 aa, Artificial Sequence
  Synthetic
KDVERILREIRETLRRVEEEAKRSNDEIRKLNEEAERIVREILKEIEKELREVRKRLTEKG

SEQ ID NO: 18978 - protein, 59 aa, Artificial Sequence
  Synthetic
DELLRRLKEELDRVERTIRELIRRNEEVLERSDESVEKLLRELEELLRRVEEEIKKAAT

SEQ ID NO: 18979 - protein, 60 aa, Artificial Sequence
  Synthetic
SEREERAKRLRKILEDLKRESEEHLRRLKTRLDKLREDSKKHLEDVRRKLEDLKRIVEEN

SEQ ID NO: 18980 - protein, 55 aa, Artificial Sequence
  Synthetic
DELRKLVRKVEEDLKRLDEENKKLLEKVKRDLDRLKKENKDLLKRVEEELRREAT

SEQ ID NO: 18981 - protein, 60 aa, Artificial Sequence
  Synthetic
SEEEERKRRLEEKLERLEEKSRRHLKEVKRTLEELEERSRRHLDENRRLLKRLKEIVDRN

SEQ ID NO: 18982 - protein, 55 aa, Artificial Sequence
  Synthetic
EEIKKLVKDIKEELKRLLEENKRLLEEAKKTLKKLLEDNRRLIEKIKKELDEARK

SEQ ID NO: 18983 - protein, 60 aa, Artificial Sequence
  Synthetic
REEERLKRELEKDLERIKKLSDEHKKRLEEENRDLRRKSREHKEKLERDLRRVEEIRRRE

SEQ ID NO: 18984 - protein, 55 aa, Artificial Sequence
  Synthetic
DEVERLLKEIEDRVRKLEKENEEIARRSTETLEKLLKENRETLKEIRDRVREAKR

SEQ ID NO: 18985 - protein, 60 aa, Artificial Sequence
  Synthetic
SEEEELKRRLKEILRELKELSERHKKRLRELNEKLKRLSEEHKRKLEEITEDLRRIATRE

SEQ ID NO: 18986 - protein, 55 aa, Artificial Sequence
  Synthetic
EEVKRLLDEIRRELERLKEENRKIVEDSTRTLKELLEENKRILEESSRDLERLKR

SEQ ID NO: 18987 - protein, 60 aa, Artificial Sequence
  Synthetic
SEEEKIKEEIKRDLEDLRRLSKEHKDRLRKLLEDIKKLSEEHKDKLRRITKELRDVVRRE

SEQ ID NO: 18988 - protein, 55 aa, Artificial Sequence
  Synthetic
EEVKRLLEKVKEDLKRLLDENKRIIERIEREVERLKRENEEILKESSRDLERAKK

SEQ ID NO: 18989 - protein, 60 aa, Artificial Sequence
  Synthetic
SKEEKLKEDLKRTLDDARRLAEETKRRLEEILEKLKRLSEKSKEDVKRTTDELRDIVRKR

SEQ ID NO: 18990 - protein, 55 aa, Artificial Sequence
  Synthetic
EEIKDLLRRIREELKRLKDELRRIIEEIRKELERLKRENEELNRRSSEELKKAKK

SEQ ID NO: 18991 - protein, 57 aa, Artificial Sequence
  Synthetic
SEVEELLERHKRALDKAKKVSEDHKRDLKEKLDDVKRKVEELERRLKRALDELTKEG

SEQ ID NO: 18992 - protein, 59 aa, Artificial Sequence
  Synthetic
EDLVRTLDELHKDIERRLRKLEEENRDILRRIREEIERLKRKLDEIARRIKEEVKKLKK

SEQ ID NO: 18993 - protein, 57 aa, Artificial Sequence
  Synthetic
SEVEELKKEHKKVLDEVRRASKKHKEELEEMLRDLKRKADELARRLEDALRRLEEEG

SEQ ID NO: 18994 - protein, 59 aa, Artificial Sequence
  Synthetic
KKAVDELRELHKEIKRRIEKLLKENEEILRKIEEDIERLLEDLRRKAEEIKRRVDETRR

SEQ ID NO: 18995 - protein, 57 aa, Artificial Sequence
  Synthetic
SEVEEIEKENKDAVRRMREKSRRHKEELKDALREAEEISRRHKEELKRKLEELTKRG

SEQ ID NO: 18996 - protein, 59 aa, Artificial Sequence
  Synthetic
EELVRKLRRLDKRTHEDVRRLLDENRRTLEKIEEDIRRLIKENEDTLREIEKRVEDKKR

SEQ ID NO: 18997 - protein, 59 aa, Artificial Sequence
  Synthetic
SEDEELKKEIEKLLRELRKRSTESKKEIEDLLDELRRKSERSRKEIEDTLRELEERAKG

SEQ ID NO: 18998 - protein, 55 aa, Artificial Sequence
  Synthetic
EEIKELLERLRRDAERLKKENEDLNRRLREEVEKNKEDNKRLNEELRKKVEEDRR

SEQ ID NO: 18999 - protein, 61 aa, Artificial Sequence
  Synthetic
SLEETLDKILEDIRRRIRENEERNRRLKEEIDKAIKRNEEENRKTNEDIKRKIDDLERKRG

SEQ ID NO: 19000 - protein, 59 aa, Artificial Sequence
  Synthetic
KKEVEELIRELEDELRKLEERSKEHLDRLREELKELDERSKKHLDELRKLEEKLRRDAD

SEQ ID NO: 19001 - protein, 60 aa, Artificial Sequence
  Synthetic
SETEKLLERIRRNVEENEKYAREHLKKLDKNLKDNKEYIDRHVKKLKERLDTLREIAREK

SEQ ID NO: 19002 - protein, 55 aa, Artificial Sequence
  Synthetic
ERIEKLLRELERTHRELKEELDKLHKRLEEEHRRLEKKLRDIHRKVEKDLRDLKR

SEQ ID NO: 19003 - protein, 60 aa, Artificial Sequence
  Synthetic
EEKERLKKRIRDNVEENKKYAEEHLKRLKEKLEEVRKYIEDHKDRLRRKIEELKKDAERK

SEQ ID NO: 19004 - protein, 55 aa, Artificial Sequence
  Synthetic
EEIRRILEELRRTHKKLEEELEELHKRVEDELRRLEDELREIHERLEETLRRLRK

SEQ ID NO: 19005 - protein, 60 aa, Artificial Sequence
  Synthetic
SEKEKLKEEIKRNVEENRRYVEEHKRDLERNAEENEKYIREHLKRLKEEAEEVRDRVAKE

SEQ ID NO: 19006 - protein, 55 aa, Artificial Sequence
  Synthetic
KEIERLLRELERTHRELRKDLKRIHDELKKKHDDLRRTLEEVHKRVKEELDRARR

SEQ ID NO: 19007 - protein, 60 aa, Artificial Sequence
  Synthetic
SEKEELIERIRRNLEENRRYIERHLEELEKKLDDVRRKAKRHLEKLREELEKLKDDARKK

SEQ ID NO: 19008 - protein, 55 aa, Artificial Sequence
  Synthetic
EEIRKLLEELRKTHEKLKRDLERLHKKVRDTLKKLEDELKELHKRVDDELRKLRK

SEQ ID NO: 19009 - protein, 60 aa, Artificial Sequence
  Synthetic
DEERKLEELEKENDKLLEDAKRTLEKLLKDNRDLVKRVEDELRRLEEENKKLADDVRRDG

SEQ ID NO: 19010 - protein, 56 aa, Artificial Sequence
  Synthetic
SKELEDRSREHLERLKARLKELEDKSRKHLEEVKKELRELEEKSKKHLKRLEDARR

SEQ ID NO: 19011 - protein, 60 aa, Artificial Sequence
  Synthetic
DEEETLKRLDEENDKLLEEVKKTLEDSLRRLEELHKRTEEELRKSRRELRELVKDVERKG

SEQ ID NO: 19012 - protein, 56 aa, Artificial Sequence
  Synthetic
KEELRDKSRRHLEDVKRRLEELKKSNEEALRRDEKKLEDLRRSNEKVLRELKEKAR

SEQ ID NO: 19013 - protein, 60 aa, Artificial Sequence
  Synthetic
SEEEEVRRLEEELKKLHDDIKRRLEELLRENEKILRDIDREIKKLLEELRKTIDKADKDG

SEQ ID NO: 19014 - protein, 56 aa, Artificial Sequence
  Synthetic
KDELRKIVEELKRDHEKDLRKVEKLSEEHKEKLRRALEELKRLAEEVKKRLDDERR

SEQ ID NO: 19015 - protein, 59 aa, Artificial Sequence
  Synthetic
SVEERLEEMERRNKDLIRRVEEDLERLLKENRDLIRRIKEELKRLKEELKELVERISRE

SEQ ID NO: 19016 - protein, 59 aa, Artificial Sequence
  Synthetic
EEVLKELEEENRKHEKRLRDALERLRRRSKKHKDEARKILEELKERAKTIKRRLEEDRR

SEQ ID NO: 19017 - protein, 60 aa, Artificial Sequence
  Synthetic
SVKEDLRKAKEENKRLIEKAEDDLRKLLRENKELLKRIDEELKRLKKELDDIVRRIEDKG

SEQ ID NO: 19018 - protein, 59 aa, Artificial Sequence
  Synthetic
EEVLEKLKRDNEDHKRRLKEDLRRLREESKKHKKKLEDRLKKLEERARRIKEKLKEEER

SEQ ID NO: 19019 - protein, 62 aa, Artificial Sequence
  Synthetic
DDEERIRKIAEDIKRKLKETLERLRDESRKNKRKLEDLLRKSEEKAKRLKDKLRKMEEEKER

SEQ ID NO: 19020 - protein, 55 aa, Artificial Sequence
  Synthetic
EDVKRLLRELKEITDRIDEEVKRLREENERITRRIEEEHKRLNKELERILREIER

SEQ ID NO: 19021 - protein, 57 aa, Artificial Sequence
  Synthetic
SSEEKAKELRKRLRETHKRVKDEIKRLKEELEESHKRLEERSRETLRKLEELIKELN

SEQ ID NO: 19022 - protein, 56 aa, Artificial Sequence
  Synthetic
DTELEKDVRRVEEKNRRALEDVRRKVEEVKESNKRALEKNERIVREVERRLREEKK

SEQ ID NO: 19023 - protein, 57 aa, Artificial Sequence
  Synthetic
SSEERFEKLDRELKRTHEELERAIRELKKDYERSLKRVEEELKRLLDELEELARRVG

SEQ ID NO: 19024 - protein, 56 aa, Artificial Sequence
  Synthetic
DTKVTETVRRVREENKRMLEDVKRDVDRLRTSNEKVLRDIRRTVKRAKERLKELKE

SEQ ID NO: 19025 - protein, 60 aa, Artificial Sequence
  Synthetic
SAEDELRRLRRELEKSHEELKRRIDELLKRLRELVKRVKDRSKELLDELRKLLEDVKRKG

SEQ ID NO: 19026 - protein, 56 aa, Artificial Sequence
  Synthetic
DTRVRERVKETRRRNEEVLREVERIAKEVEDDLKRILEELEDNVRRVKKKIKDVER

SEQ ID NO: 19027 - protein, 60 aa, Artificial Sequence
  Synthetic
SSEEELKKLEKELEETHRKLKEDVERLLRDLDRKVKKVEDDSKKLLDELRKLLEEAKRRG

SEQ ID NO: 19028 - protein, 56 aa, Artificial Sequence
  Synthetic
ERDVRKRVKEMKEDNRRALEDIRRKTEEVAKKLREILKKLRENVRRVAEEIKRVAD

SEQ ID NO: 19029 - protein, 60 aa, Artificial Sequence
  Synthetic
STEEELERLRRELERTHERLREESEKLVRELRKLVEEVREALERLRRDLKRLLKEVREKG

SEQ ID NO: 19030 - protein, 56 aa, Artificial Sequence
  Synthetic
ETEVREEVKRTKEENKRVEEKLRRNVDEMRKKLEEILRRIKEEIDKMRRKIEEIER

SEQ ID NO: 19031 - protein, 60 aa, Artificial Sequence
  Synthetic
DVEEDLKRLEKKNRDLNKRMEDSNRKLEEDDERVNRKIRKDHKKAEDDLRRVIKEVEEEN

SEQ ID NO: 19032 - protein, 55 aa, Artificial Sequence
  Synthetic
EKTIEDIERHLDRLRKENDKLRKELEDHIRRLEEEVRKNLDRIREEIERARERVR

SEQ ID NO: 19033 - protein, 59 aa, Artificial Sequence
  Synthetic
RAEDEVRKIKKEIDELIRRLEKLNEDIKREIDELVRRLEELNKRVKEEIKRLIEELKKE

SEQ ID NO: 19034 - protein, 56 aa, Artificial Sequence
  Synthetic
DRELKERLDRMRDHARKHEEKLKESLKRVREHVKRHAERVEESLRRLKRDVDELRK

SEQ ID NO: 19035 - protein, 57 aa, Artificial Sequence
  Synthetic
SSDEKLEEIERHHRKVEEESRRLDEDIKRHHKEVEDESRELLERIKKKLEDVTRALG

SEQ ID NO: 19036 - protein, 55 aa, Artificial Sequence
  Synthetic
DEILEKLERDNRRYKEESEEEVERAKEENRRYLEESRREVEEFDRKLKEIADRAR

SEQ ID NO: 19037 - protein, 57 aa, Artificial Sequence
  Synthetic
SELEERVKKVEKVNEDLKRRVEEHERRVKRTLERLEEEVRRHAEKVKKRLEELRRLA

SEQ ID NO: 19038 - protein, 59 aa, Artificial Sequence
  Synthetic
ERIEDLLRRLDDRNRETEREIEERHKRLKEELDKVEERIRREHEKLKRELEEVERRTRK

SEQ ID NO: 19039 - protein, 60 aa, Artificial Sequence
  Synthetic
DVVDELRRIAKEVRDRLREIVERLDRIAKEVVKENEEVVRHNDELAKRVVTTAKRIVDEV

SEQ ID NO: 19040 - protein, 58 aa, Artificial Sequence
  Synthetic
EEVKRVVETVRKLLRDAEKEIEEVVKKVRDLLRRVNKELKESVERVRRLLEEVRERAR

SEQ ID NO: 19041 - protein, 61 aa, Artificial Sequence
  Synthetic
SDLDRVLRKIEELVREIEKESERTNRKSERDTEEVARRSEDSDRDIERLVREIRDRLRKAG

SEQ ID NO: 19042 - protein, 59 aa, Artificial Sequence
  Synthetic
KDVVRELEEIVKELEERAKENVKRSEKSVKEDLDVLADNVRRSKEIVEEIKKRADEVVT

SEQ ID NO: 19043 - protein, 57 aa, Artificial Sequence
  Synthetic
SEKEKVIKEARELLERLRKRLKDVNDDVTRLLDELRKENEKSREDVEREVKRLEEEV

SEQ ID NO: 19044 - protein, 56 aa, Artificial Sequence
  Synthetic
AEELKRVADRLRRRLERLVEENERVVKKILDEIRRSVEENKRIVDKVRKDLDERRK

SEQ ID NO: 19045 - protein, 57 aa, Artificial Sequence
  Synthetic
DEDEKVLRKIEELVRRLHEKNRKVLEESKRTLEKVEERLRRVLKEIEDLVRDAARRV

SEQ ID NO: 19046 - protein, 56 aa, Artificial Sequence
  Synthetic
VSELDKIIKELKREADESVKKLKEIVKRSLDHLEEVVKELKKRLDDLKREIDTKAK

SEQ ID NO: 19047 - protein, 59 aa, Artificial Sequence
  Synthetic
SLEEEVKKVVEEIKRRIEDDVRRIRELVERIKKLIEKDVTDLKRVVDENRDLAEKAKRI

SEQ ID NO: 19048 - protein, 55 aa, Artificial Sequence
  Synthetic
EELLRELRRVLEEAREDSRRLLEEIRKVLEEAEEKSRRVLEESKRVNDELRERLR

SEQ ID NO: 19049 - protein, 59 aa, Artificial Sequence
  Synthetic
SLDESAKRVLEEIKRLAKEDLDELKRVLDEIKEILREVLEANRDSVRRIEEEVEKLARV

SEQ ID NO: 19050 - protein, 55 aa, Artificial Sequence
  Synthetic
DRVLEEIERVIRKIEEDSRRLLKEIADVIKKVREESKRLLDDLKRVIDELRERAR

SEQ ID NO: 19051 - protein, 59 aa, Artificial Sequence
  Synthetic
SLEEVLDRVRRESDKVRKTLERVKEEVERVSREVVEDLKRVEEEVRRLIERVKDILRRS

SEQ ID NO: 19052 - protein, 59 aa, Artificial Sequence
  Synthetic
EELIRDVLREAERLVKESLDDIRRLLDEVRRLVEESRRNIERLLEEVRRLVEEIERAAE

SEQ ID NO: 19053 - protein, 60 aa, Artificial Sequence
  Synthetic
DKVDEVLKRVKRVVEEIEDRVRKLNKEVRDVVKRIEELAREVLDHSRKVVEEIKKTAEDR

SEQ ID NO: 19054 - protein, 56 aa, Artificial Sequence
  Synthetic
EEVVRTVKEELDKALEKAERVLEHSRRMLERVLKEAKRVLDEVKELNKRVIDEVRR

SEQ ID NO: 19055 - protein, 56 aa, Artificial Sequence
  Synthetic
SVEDVAREVDKLLKRANEESKRVLEEVERLLRTVSRELEKVIRDVKKLIDDVEKRV

SEQ ID NO: 19056 - protein, 59 aa, Artificial Sequence
  Synthetic
SETAEKVLRDVERIVRRNEELVREVLRRVKKIVDENRKIAEDALRKVEELVKELEERAR

SEQ ID NO: 19057 - protein, 59 aa, Artificial Sequence
  Synthetic
SEAEEALERVKELVKRSEELAEESLRRARKSVEEVARRAEEALERVKKSVEEVKEVRKE

SEQ ID NO: 19058 - protein, 56 aa, Artificial Sequence
  Synthetic
KEVLDKVRDLVRRVDEENRRVIEEAKKLSEDVARRVDKVIKDVERLSKRVEDEVRR

SEQ ID NO: 19059 - protein, 58 aa, Artificial Sequence
  Synthetic
DEDRRAVEELRRVVEEVNKLNEDTLRELERIVRENIRRVRELLKEAEDVVREVEKEVR

SEQ ID NO: 19060 - protein, 55 aa, Artificial Sequence
  Synthetic
EEVLREAKDLIDHVRKTIEEVNDTVRDLVRKVHEVNKEVLDRIRKLVEEVRKTVE

SEQ ID NO: 19061 - protein, 61 aa, Artificial Sequence
  Synthetic
SSLDRVRRAIEELVKKVNTDSKRVKDRVRKLLKEVNDTSDRVRRDVKRKLDKVKDDARKAG

SEQ ID NO: 19062 - protein, 59 aa, Artificial Sequence
  Synthetic
DRVVERVVREVERIVRENEELVKEVVRRAEEIVERNERHSRELLRRLAELVDDLRRKIE

SEQ ID NO: 19063 - protein, 61 aa, Artificial Sequence
  Synthetic
SSLDEVRKRVTELLKKVDDTSKKVEDDVKRLLDKSTRTSDEVRKAAERLLEEVEESARRKG

SEQ ID NO: 19064 - protein, 59 aa, Artificial Sequence
  Synthetic
DEMVKRVLEELKKIVDDLERHSRKLLKDARRIVEESIEHSDRVLKEATRIVEKLERDIR

SEQ ID NO: 19065 - protein, 59 aa, Artificial Sequence
  Synthetic
DEIEEVLREMRELVERNVREIEKVVRENEKLVEDNIRLVREVAKELRDLVRKLIERVAR

SEQ ID NO: 19066 - protein, 58 aa, Artificial Sequence
  Synthetic
EELEEVVKEARRLLKKSEEDLRRVEKRVEELNEKSKEEMERVRDDVRRLLEEVKERAR

SEQ ID NO: 19067 - protein, 60 aa, Artificial Sequence
  Synthetic
SEVDELLRLADEIVRELRELVRRHDEIVDKLVEENRRIVEEHLRRVEDVVRRLKELVKKI

SEQ ID NO: 19068 - protein, 58 aa, Artificial Sequence
  Synthetic
EEAERVVKEARRLLREIEELVKRSVERVERLHREVHERIKESTKRVEELVDEVRKAVK

SEQ ID NO: 19069 - protein, 60 aa, Artificial Sequence
  Synthetic
SAVDEVRKVIKEIFDRLAELLKHNSDMVRRLLEEIRELVKNNTEIVREVLKKLEDILREL

SEQ ID NO: 19070 - protein, 59 aa, Artificial Sequence
  Synthetic
EEKLEKVAEDARRAIKDIEDKLRDSNRRLDKLIKEVRRRLEESHKRIEREIKEIEERVR

SEQ ID NO: 19071 - protein, 61 aa, Artificial Sequence
  Synthetic
DKLDEVKEAARRVVEEAHKKNRRVLEKLDEVSRRAHELDKRVKEKLKEVVKRADDLLKEKG

SEQ ID NO: 19072 - protein, 60 aa, Artificial Sequence
  Synthetic
VDTLVERLRRLVEELRKHSDDTVRRMEDIVRRNKKHSEESVRKMDDIVKKLEELAREVVR

SEQ ID NO: 19073 - protein, 61 aa, Artificial Sequence
  Synthetic
DRLDKVKEDLKRSSEDAHRKNKEAIELLDEVSTEAHKLDEDVRRKLEKVVREVRKLLEDKG

SEQ ID NO: 19074 - protein, 60 aa, Artificial Sequence
  Synthetic
IDTIVRDAEKIVEDNRRHSDETVRRIERLVTENLRHSEESVRTLDRLVEELLRTAEEVVR

SEQ ID NO: 19075 - protein, 61 aa, Artificial Sequence
  Synthetic
DKLERVLRELERSSKEAHEKDKKVLEDLDEVSKRAHKANEEVIARLEDVVRKAEDELRKKG

SEQ ID NO: 19076 - protein, 60 aa, Artificial Sequence
  Synthetic
LDTLVKRIEDIVKENEDHSRRSVEEIRRIVEENERHSRESVKTIKDLVEELERRAEEVVR

SEQ ID NO: 19077 - protein, 61 aa, Artificial Sequence
  Synthetic
SELEKVLKDLEESSKEAHKADEEVLRRLERVSREAEKELKRVLDDLRRVVEEVERLLREKG

SEQ ID NO: 19078 - protein, 60 aa, Artificial Sequence
  Synthetic
LETLVRDARRIVKENEEHSRDSVRRIDKIVKENADEVRRVVKEIKDIVKRLEELARETVR

SEQ ID NO: 19079 - protein, 56 aa, Artificial Sequence
  Synthetic
SLDEDVDELVKRVEEEMRRNVKELDKLVKEDKRLAEENVRRLEEIVDRSRKLADRK

SEQ ID NO: 19080 - protein, 55 aa, Artificial Sequence
  Synthetic
EEVLKRLREVIERARRDSERVLRKLEKTTDKVRRDSERVLRENEKSIEDVARKMT

SEQ ID NO: 19081 - protein, 61 aa, Artificial Sequence
  Synthetic
DELERLLEELKRTTRKIEEELKEVNRRLDDTTREAEKELRRLKEKLEEVVKRAEELLRRRG

SEQ ID NO: 19082 - protein, 60 aa, Artificial Sequence
  Synthetic
EKDVVKRLEDLVRDDDRIAKEDVKRLEDLVREDRTLVKEIVDRLEELVRTVEKLVKEVVN

SEQ ID NO: 19083 - protein, 56 aa, Artificial Sequence
  Synthetic
SAIEKVKEVVERVLETVRDSVRRSHEESKRLIDKVRKRLEEVREEVKELIERVRRK

SEQ ID NO: 19084 - protein, 59 aa, Artificial Sequence
  Synthetic
KDAVEDVLRRIEELIRDLNKKNDDNVRRVKEVIDRAEKLVRDLLREIRKLIEKLIRDTE

SEQ ID NO: 19085 - protein, 57 aa, Artificial Sequence
  Synthetic
SVLEEVRRRVEELLKTVKESVDRSHERSERLIEEVRESLKEVKRRVKELVERVREKG

SEQ ID NO: 19086 - protein, 59 aa, Artificial Sequence
  Synthetic
DKVARDVLEEIERLIREANERNKRNLEDVERVIRELNKENERVLREVEKKIEKLIRETE

SEQ ID NO: 19087 - protein, 57 aa, Artificial Sequence
  Synthetic
SSIERVEKEVRRLLRESDESLKRVMEEAKELIKSVRESTKRVEEDARDLLRKVVERT

SEQ ID NO: 19088 - protein, 59 aa, Artificial Sequence
  Synthetic
EEEVERVLEEVRRIIEKLKEDDKRSLERIERIVRRNNELNKESVDRIRKIIKEMEERAD

SEQ ID NO: 19089 - protein, 57 aa, Artificial Sequence
  Synthetic
DESEDVEEKMRRLLEKSKDETRRVKEEVERLNEESKRVTEEVEKRVRDLLREVREKV

SEQ ID NO: 19090 - protein, 56 aa, Artificial Sequence
  Synthetic
VETVLREAKRLIEESIERIERVLKENRELAERSIKVLRDVLREVEDLIRKLEERAK

SEQ ID NO: 19091 - protein, 56 aa, Artificial Sequence
  Synthetic
RKVEEVKKEAERLLRRSEEVSKKVADDADRLLKRSREVSDRVRRESERLLKEVAEA

SEQ ID NO: 19092 - protein, 59 aa, Artificial Sequence
  Synthetic
DKRVEDVLREARDLVRRSIKKIDEVLKEAKRLVEESIKLSEDNVRRNEEIIRDLERRTR

SEQ ID NO: 19093 - protein, 56 aa, Artificial Sequence
  Synthetic
SAVERVKEEVDRLLERSKKESERVRKESEDLIRESDEVSRKVEEDSRRLIEEVERS

SEQ ID NO: 19094 - protein, 59 aa, Artificial Sequence
  Synthetic
ERVVTRLLEEAKRLVERSIEEIKRNVKENRKLVEESIKLSEENVKRNKRLVDEAIRAAE

SEQ ID NO: 19095 - protein, 61 aa, Artificial Sequence
  Synthetic
SVVEEVVERVKRIAEELKRSSEENVDTVRKVVAEAKKLVEDDVREVEKLARRLKEVVTRDI

SEQ ID NO: 19096 - protein, 59 aa, Artificial Sequence
  Synthetic
ERVLKDVKDKADKLIREVEETSKRSEEDVRKVIEEVREVLRESHERVKELIKEVREAER

SEQ ID NO: 19097 - protein, 60 aa, Artificial Sequence
  Synthetic
SEAEKVAEDARKLAEEVIRLIEEVVERSKELVDRNEKEIRRVIEESDKLVEEVIRLLRRG

SEQ ID NO: 19098 - protein, 58 aa, Artificial Sequence
  Synthetic
ESVREVEKIVRDVVREIREMLKRSKDETRRVIKRVREVNDRSEKRSRDVVREARETSR

SEQ ID NO: 19099 - protein, 60 aa, Artificial Sequence
  Synthetic
SEAEEVARRARKLVRELEELIRKSVEDSRELVKRNIEKIKRNVRKSEEDVDRVIKLLRRG

SEQ ID NO: 19100 - protein, 58 aa, Artificial Sequence
  Synthetic
EAVREVDRIVKEVVRRVREALERSREETRRVIEEAKKANKESDDVSRKVAKEIDEEAT

SEQ ID NO: 19101 - protein, 57 aa, Artificial Sequence
  Synthetic
RVIEEVDKEIKRVIKESEDVTKEVKDTSRKVLEDSKRESERVRRRSEEVLKKVEEEG

SEQ ID NO: 19102 - protein, 59 aa, Artificial Sequence
  Synthetic
EDEVRRVAEKVKRLVDESIKRLKDNVKRNKELVDESIREVERNVEENERLATKVIEEAK

SEQ ID NO: 19103 - protein, 57 aa, Artificial Sequence
  Synthetic
SVIERVEEEMEKVIRDSERVTKEVEDRAREVHERSEKRIREVEETSRRVLEELRRAG

SEQ ID NO: 19104 - protein, 59 aa, Artificial Sequence
  Synthetic
EEEVKKLAEEVRRLVEDSIRKLEELARRVDELVRESIERVDRNVEENKRLVREAIERRR

SEQ ID NO: 19105 - protein, 57 aa, Artificial Sequence
  Synthetic
SVDREVEEIMRRVHKESEDVIRKVKDTVRRVLERSREVSERVKRDAERVLEEVKRAG

SEQ ID NO: 19106 - protein, 59 aa, Artificial Sequence
  Synthetic
KDFLKRVAEEVKRLVEESIKRVEDVAREVERLVEESIRLLEAVAKKVRDLVREVKRRRT

SEQ ID NO: 19107 - protein, 59 aa, Artificial Sequence
  Synthetic
KEIEDLVKKIREIVDRIKKTVEDSVREVRRIVDESAKSVEELVKELKKLAEELRKLVED

SEQ ID NO: 19108 - protein, 58 aa, Artificial Sequence
  Synthetic
ELIRTVERELREVEKEVKKMLDESTEVLKEVEERVRRMNDDVRRVLEKVARDVERDLR

SEQ ID NO: 19109 - protein, 59 aa, Artificial Sequence
  Synthetic
KEVEEVVTKVDDLVRELEERSRRHVERVKEIADRNEKLVREVVKRSRDNVRELEELVRR

SEQ ID NO: 19110 - protein, 59 aa, Artificial Sequence
  Synthetic
REVLEEVKKRIRDVLKRVEDASKRVKETIDEVLKRIKELTEDVERKSREVLRRVKEARK

SEQ ID NO: 19111 - protein, 59 aa, Artificial Sequence
  Synthetic
KEVEDIIRKLRRHVKEIERTIREMVESVKRLADEVVKVLKDALDSARDHVRKILETLRD

SEQ ID NO: 19112 - protein, 59 aa, Artificial Sequence
  Synthetic
EDVLRELRKVIEDTERTIKRLVDELEKVHREVKERIRKIAKDLRDKHKKSKRDIRETER

SEQ ID NO: 19113 - protein, 57 aa, Artificial Sequence
  Synthetic
SAKDEVKDVNDKVRKEVRRVIEESRAVNEEIKRRVDTVLKESEDVNREVKREVEDKV

SEQ ID NO: 19114 - protein, 59 aa, Artificial Sequence
  Synthetic
EKVAKEIVRKSEDVVRRIVEELKEDAKRSRDLVRELVKEIKEDVKRSRELVKRVVEEAK

SEQ ID NO: 19115 - protein, 60 aa, Artificial Sequence
  Synthetic
REAEELVKRNEKIVTDIRRLVEKTVRDSRRVVEELKREAEETVERSRRVVTKLKELVERG

SEQ ID NO: 19116 - protein, 58 aa, Artificial Sequence
  Synthetic
RMVEEVERTSREVEEEVKRVLKKSRDVTREVEEEVRRLLERSRKETDDVRKRLEEAER

SEQ ID NO: 19117 - protein, 60 aa, Artificial Sequence
  Synthetic
DEAERLVEEIKRVVKEAEDLVRRTVEISRRVVETLRKEAEDLVRDSERVVKELTELARRG

SEQ ID NO: 19118 - protein, 58 aa, Artificial Sequence
  Synthetic
ELVEKVRRVIEEVEKRLRDMLRKSRDVTREVKERVARMLEKSKKVTDDVEKRVTDEDR

SEQ ID NO: 19119 - protein, 60 aa, Artificial Sequence
  Synthetic
KEAEDLVRRVEEVVEELERRVEKLVRESEEVVKKLSKEVKESVDTNRDIVRRITELARRG

SEQ ID NO: 19120 - protein, 58 aa, Artificial Sequence
  Synthetic
EKVEEVERVIRRVKKRVEEVLRKSKTTTTDVERRVREMLERSEESTRRVKERADRERT

SEQ ID NO: 19121 - protein, 59 aa, Artificial Sequence
  Synthetic
SEADDVVREIEDLVRRDKELVDEVVKRIKDLVRRDKKLVDEVVKEIKDLVTELEDLARK

SEQ ID NO: 19122 - protein, 59 aa, Artificial Sequence
  Synthetic
EEMLRKLERVVEEVKRRSTEALKRLREVVKEVKETSKRANEELERVVREVKKRLDDATK

SEQ ID NO: 19123 - protein, 59 aa, Artificial Sequence
  Synthetic
DEVREVVKEIRKLVEDDKRRVDKVVEDDRRLAKRDLDLVEDVVRRIEDLVRRVLEEARK

SEQ ID NO: 19124 - protein, 59 aa, Artificial Sequence
  Synthetic
KSVLDELRKVVEEVKERSDRALEEVERSIRESEKESRRANEKLRKVVEEVRKKLEEAER

SEQ ID NO: 19125 - protein, 59 aa, Artificial Sequence
  Synthetic
SEVDKVVKDIRDLVRRDLKRVEDVVRTDRRLAEEDLRRVKEVVEKIEKDVKELDELARK

SEQ ID NO: 19126 - protein, 59 aa, Artificial Sequence
  Synthetic
ESVLKKLKDVVDEVERESREALRKVEESIKESKRRSEKALEELREVVKRVDRLLEEARR

SEQ ID NO: 19127 - protein, 59 aa, Artificial Sequence
  Synthetic
SEVDEVVKEVEDLVRRNEELVEEVVRRVEKVVTDDRRLVEEVVREIRKIVKDVEDLARK

SEQ ID NO: 19128 - protein, 59 aa, Artificial Sequence
  Synthetic
EKVLRKLEKVIREVRERSTRALRKVEEVIRRVREESERALRDLERVVKEVEKRMREAAR

SEQ ID NO: 19129 - protein, 60 aa, Artificial Sequence
  Synthetic
DEVDEIVRRIEKLVTDDLKRVEDLVREVKKLVDEDKRKVDEIVKEIRRLVEEIRKEAERD

SEQ ID NO: 19130 - protein, 59 aa, Artificial Sequence
  Synthetic
EKVKRKLRKVVEEVERRSKKANEELEKKVREVEELSKRVLEKLKKVADEVRKEVKDAKD

SEQ ID NO: 19131 - protein, 60 aa, Artificial Sequence
  Synthetic
DSVERLVETIREIARESLRRAKELVKSNKKLAEDSKRRVDKLVKELKDLVTRVKETLKRK

SEQ ID NO: 19132 - protein, 58 aa, Artificial Sequence
  Synthetic
EVLELIEEVVREVKEVNTTVSKEVEDVVEETRKVNEDVAKLIEKVVREVKRVVDEVRT

SEQ ID NO: 19133 - protein, 60 aa, Artificial Sequence
  Synthetic
SELERLVEEIRRLVREIEERSKKTTEDIKRLAEDIRRRSKEAVDENEDLARKIRKRAEER

SEQ ID NO: 19134 - protein, 55 aa, Artificial Sequence
  Synthetic
REIDKVIEEVRKRLKEVTDSDREVIKEIEEVLREVEERNRRSIEKIRKVLEDVTK

SEQ ID NO: 19135 - protein, 60 aa, Artificial Sequence
  Synthetic
SEVDELVEKIRTTVKRVLEKHKRNTDETRRLVEEILERHTRTSRRIERVVREATDKLRRR

SEQ ID NO: 19136 - protein, 58 aa, Artificial Sequence
  Synthetic
EMLEKLREVLERAAEVLKRAEESDRTVDEEVERRVREVARSDDEVLKEVKREVERVKT

SEQ ID NO: 19137 - protein, 60 aa, Artificial Sequence
  Synthetic
SEAEEVAKRVKEIAKENADLAREVAKDIKRLADENKKHADDVARDIERLAKELLEAARRG

SEQ ID NO: 19138 - protein, 59 aa, Artificial Sequence
  Synthetic
ERAEKLARDAAEEAKKAAEESNKLIREAAERLKEAARRADKLVEEAARRLEKAAEEARR

SEQ ID NO: 19139 - protein, 60 aa, Artificial Sequence
  Synthetic
DEVDEVVRRDERLAEENLKRNTESSKRDRDLARENLKDAKRVVERIRKLMEDLKKLFDRG

SEQ ID NO: 19140 - protein, 59 aa, Artificial Sequence
  Synthetic
EKLTRRVEESLKRSEEVLRRVNESDKRSLEETRKVLEESNKEIEKVVRDLEELLKEVRR

SEQ ID NO: 19141 - protein, 60 aa, Artificial Sequence
  Synthetic
SEADKVVKEVDDIVARNTEENDKSSKRVEDIIRENDKHAEEVVRDIRRLAEELRELRERG

SEQ ID NO: 19142 - protein, 59 aa, Artificial Sequence
  Synthetic
EELEKRLRDVVRRAEERLRDVNRSDEEVVRRAEELLKRVDDRVKTVVEELKKTLDDERR

SEQ ID NO: 19143 - protein, 60 aa, Artificial Sequence
  Synthetic
EEVDRVVKRDDDLARKNLEENERSSREDDRLVKENEDHAKKVVDDIRKLMEELRELARRG

SEQ ID NO: 19144 - protein, 59 aa, Artificial Sequence
  Synthetic
EELEKRLRESLRRSREVLKRVNESDRDSLERTKKRLEDVDREVRKVVEELRKVIRDEEK

SEQ ID NO: 19145 - protein, 60 aa, Artificial Sequence
  Synthetic
SEAEEVARRVEKIAEDNARHAEKVAKDIEDLARENLELNERTSRRVERLARELLKAARRG

SEQ ID NO: 19146 - protein, 59 aa, Artificial Sequence
  Synthetic
EEARKLARKAAEDARRAAERANELVKRAADELRRAAEEANKSDEDAAREARRAAEEAER

SEQ ID NO: 19147 - protein, 60 aa, Artificial Sequence
  Synthetic
KDVEDVVREDEELAKTNKKHADDVVRRIKELIDRNRRLNEETSKRIEDLVRRLLELARRG

SEQ ID NO: 19148 - protein, 59 aa, Artificial Sequence
  Synthetic
ERVRKEVERSLRKSDEVLRRVNDKVRRVLEELRKVLEDVNRSDEKVLRELEELLERVRT

SEQ ID NO: 19149 - protein, 58 aa, Artificial Sequence
  Synthetic
SEDEKVRKVVEEAKEVNRRAEEAIKDVSERLERVNREVTKRSRDVSEEVRKMLERDAS

SEQ ID NO: 19150 - protein, 56 aa, Artificial Sequence
  Synthetic
VDEVVKRIKELVDRSLELAERIVERNERLVEKSERDVRKIVEDNKRLADEVAKRAT

SEQ ID NO: 19151 - protein, 58 aa, Artificial Sequence
  Synthetic
REDELVDKVLRELEELLRRVKKRLEDVSRDLERVNREVRDELRRVSKKVEDMARRDVG

SEQ ID NO: 19152 - protein, 56 aa, Artificial Sequence
  Synthetic
AETVVRDIRRLAEELLRTVDKIVKDNERLARESRERVRRIVERNEELARDLARKAR

SEQ ID NO: 19153 - protein, 58 aa, Artificial Sequence
  Synthetic
DDEKKVEDVVRKVKKVAEDVRRRLEKVSREVKKVLDEVRRRVEEVSREVEEILRRAAS

SEQ ID NO: 19154 - protein, 56 aa, Artificial Sequence
  Synthetic
ADEVVKRIEDLVRDLERRVDEIVKRNKELVKRVEEEADKIVEDNKRLAEEVLRKAT

SEQ ID NO: 19155 - protein, 57 aa, Artificial Sequence
  Synthetic
DSRRKVKEVIKELEEVLRRVKEEVEKVSRDLERLLKEVKEKLERVSRKVEEEIREKA

SEQ ID NO: 19156 - protein, 56 aa, Artificial Sequence
  Synthetic
ADTVVKRIKELMKDVERIVEEIVRENRKLVTDLLREVDRIVEENERLAEELAERAR

SEQ ID NO: 19157 - protein, 58 aa, Artificial Sequence
  Synthetic
SSKEKVERVVERLRRVNEEVIRLIEKVSRELEEVNKEVRERIERSVKETEDILRTAAS

SEQ ID NO: 19158 - protein, 56 aa, Artificial Sequence
  Synthetic
VDTVVREIEKLMDDSKKKADRIVDENRELVKRSEEAVEELVRRDKKLAEDVFRKAE

SEQ ID NO: 19159 - protein, 58 aa, Artificial Sequence
  Synthetic
DDERKVKKVVKEVRKVDEEVARRLDKVSKELRDVNREVKKKMEDSVKKTEDLAKKDAS

SEQ ID NO: 19160 - protein, 56 aa, Artificial Sequence
  Synthetic
ADTVVKRIKELAEESEKRVDKIVKRNKELVDKSKKDVDELVKRDEELMKDLVEKAR

SEQ ID NO: 19161 - protein, 58 aa, Artificial Sequence
  Synthetic
SAEEKVRKVLKELREVNERVERELKRVSDESERVDDEVNTRAKKVVRDVERVLEERAG

SEQ ID NO: 19162 - protein, 56 aa, Artificial Sequence
  Synthetic
VDEVVERIERLARESKKRVERIVRENEKSARESEKRADEIVKTIEELAERVARRAT

SEQ ID NO: 19163 - protein, 58 aa, Artificial Sequence
  Synthetic
KDEERVKEVVKKLRKVNEDVRRLIERVSRESKRLDEEVNRELDESAKDTERALRERLG

SEQ ID NO: 19164 - protein, 56 aa, Artificial Sequence
  Synthetic
ADEVVKEIEKLAKTSEELARRIVRENEESARESLERARKLVEDDRRLVKEVVERAE

SEQ ID NO: 19165 - protein, 60 aa, Artificial Sequence
  Synthetic
DLEERLATVVRKVEEDLKKLRRDNEKVIREVEKLNEDLNRRNKKLIDEVRKLLEKAKREG

SEQ ID NO: 19166 - protein, 59 aa, Artificial Sequence
  Synthetic
EKRVRELLEKIKRLLEEVDRRVKESIKEIEDSLRRSKEKADRSIEEIKKLLDDLRERAR

SEQ ID NO: 19167 - protein, 59 aa, Artificial Sequence
  Synthetic
SVEDLLRRVVEEVRKELERLKRKNEKVVKEVRKKNKEVNDRNEEVIRRVEKRLKKLKED

SEQ ID NO: 19168 - protein, 59 aa, Artificial Sequence
  Synthetic
EEEVRRLVRRIEKIVDEVRKRVDKSVEEIKRSLKRSKELADESLERIRRLLEEIDERVR

SEQ ID NO: 19169 - protein, 60 aa, Artificial Sequence
  Synthetic
SSDEELKKVLEDMKRVLEKVREDMKRVNDELKEAVERVKKESDDVDRELRRVIEEVVRED

SEQ ID NO: 19170 - protein, 56 aa, Artificial Sequence
  Synthetic
VKDLVRTVERLVEEIKDLVRKDVERVKKIVRRIEDLAKKDVEVSEKLVKEIKDRAK

SEQ ID NO: 19171 - protein, 60 aa, Artificial Sequence
  Synthetic
SAKELLDDVAKKLEEVVERVARKLDEVDERLREMIERVRKELEDVNRRLRDLVRRVVDKD

SEQ ID NO: 19172 - protein, 56 aa, Artificial Sequence
  Synthetic
VEEVVRDVERIVDEIEKRAEKVVRDSEKLVRDIEELVRRDVREVERIAEEIEKEAT

SEQ ID NO: 19173 - protein, 60 aa, Artificial Sequence
  Synthetic
SADEELERVLRELDKVIKDVVEESRDVDRKLERVVREVERLLDDVDRRLKEVIERVVREV

SEQ ID NO: 19174 - protein, 56 aa, Artificial Sequence
  Synthetic
VKDVVTEVKKLVETVKRLVEENVKRVEKIAEEIRRLVEKVVRESDELVERIERRVR

SEQ ID NO: 19175 - protein, 59 aa, Artificial Sequence
  Synthetic
SAEELIRKAAEDARRANKEAEDLIREAAKEARRANEEAERLIREAAKRAEDALRDADRK

SEQ ID NO: 19176 - protein, 59 aa, Artificial Sequence
  Synthetic
EEEAKKLADDIREAAKRSLDRARELAKRIREAARRSLEEAKKLAEEIKKAAEKALRDAT

SEQ ID NO: 19177 - protein, 60 aa, Artificial Sequence
  Synthetic
SAVERVVREVKKTVDESRKRAEKEKREVEDVVRRIREKVKRVVDDNRRVVETIKELSKER

SEQ ID NO: 19178 - protein, 59 aa, Artificial Sequence
  Synthetic
EEAREKLDRVRKELDDANRRVEEELRRVARELEKVLREVEELLRKVDEDIRRVLDEERR

SEQ ID NO: 19179 - protein, 60 aa, Artificial Sequence
  Synthetic
KDVEEVARKVKRVAERSEELVAELVKKNKKVVDESREKVDDVVRRNKELVDTIRDLARRR

SEQ ID NO: 19180 - protein, 59 aa, Artificial Sequence
  Synthetic
EEIRKLAEDVKRELERVNKKVKELSDRAAEELKRVNEEVRKKLEEVDREIRKVLEEVRK

SEQ ID NO: 19181 - protein, 60 aa, Artificial Sequence
  Synthetic
SLMEEVKKEVDKVVREIKELVRKVEEDVKKVVKESRDKVDKVVKENKKVVEKIRDLARRR

SEQ ID NO: 19182 - protein, 59 aa, Artificial Sequence
  Synthetic
DEIRKLIKEALDKLKEVLDEARDRLKKVKEELETVNREVEKLLRDVDREIEKVLKEVEK

SEQ ID NO: 19183 - protein, 60 aa, Artificial Sequence
  Synthetic
SEAEKIVREVERVVEESRRVAKENEKEVDKVVDTIRKLIEDLARRVEDILKKIEEERRKG

SEQ ID NO: 19184 - protein, 60 aa, Artificial Sequence
  Synthetic
VKRIEDLLREVEERLRRVSEEVKKRLKELHERVEEVLRELRKRLRDLERKARKVLEEAKK

SEQ ID NO: 19185 - protein, 57 aa, Artificial Sequence
  Synthetic
DVKEVLDEARKVVEDSIRRSKELIDEVRKRVEESVEESKRLAETVAEEVREVIERAR

SEQ ID NO: 19186 - protein, 56 aa, Artificial Sequence
  Synthetic
IETVLREVKRLVRENVKRIAELVKTIEDLVRENSERVRRVVREIRELVKELEKKAR

SEQ ID NO: 19187 - protein, 57 aa, Artificial Sequence
  Synthetic
DVDELLKRVEDEVRRSKEESEKLRKEVRKEVEDSAKTSKDLIDDARRTVEEVIKKVK

SEQ ID NO: 19188 - protein, 56 aa, Artificial Sequence
  Synthetic
VDTVVERIRKLVKENSDRVREVVDTIKKLVEENVREVRRLVEEIKRLVEEVKRREE

SEQ ID NO: 19189 - protein, 57 aa, Artificial Sequence
  Synthetic
DVKEVLKRAEEEVRRSIKRTREVLERVEKMVRDSSRTTTDLIRKVRREVKRVIDEVN

SEQ ID NO: 19190 - protein, 56 aa, Artificial Sequence
  Synthetic
IDTVLEDVKRLVKENSEKIDEVVREIRELVETNRKLVEDLVREIKELVEKALRDAK

SEQ ID NO: 19191 - protein, 57 aa, Artificial Sequence
  Synthetic
DVKEVLKRAKDEVRRSSDRTRRLIEKVRDESERVVEEVKKLNEDVNREVERVIREVK

SEQ ID NO: 19192 - protein, 56 aa, Artificial Sequence
  Synthetic
IDTVLREVEKLVRDNERLVEKLVKEVEDSVRETKKRVEESVDTVRRIVEELKRRAT

SEQ ID NO: 19193 - protein, 60 aa, Artificial Sequence
  Synthetic
SEAEEVLREVKEVVDRSRELAERVLRAVRELVKRDEDLARKILEDVARVVKTIDDLARER

SEQ ID NO: 19194 - protein, 56 aa, Artificial Sequence
  Synthetic
KEVVDRADRALREVNKRLDEVVREVEKLLRESLDRSRRVIEEVAKRLEEVLKKLED

SEQ ID NO: 19195 - protein, 60 aa, Artificial Sequence
  Synthetic
DEMDEVRREVERVVREDEKLARDLKRRVEKVVEDIKRSADEVLKEVKKLVEEIRELMKKR

SEQ ID NO: 19196 - protein, 56 aa, Artificial Sequence
  Synthetic
REVVRRVEEELERSLRKSREVVKRVEKELEDVLREHRKVLEEVTDLLRRVLEELRR

SEQ ID NO: 19197 - protein, 60 aa, Artificial Sequence
  Synthetic
REAEEILKKVAEVVKEDKKLADDLRKKNKETVDDIRRKAEELLKRVKKVVEELKRRMEEG

SEQ ID NO: 19198 - protein, 59 aa, Artificial Sequence
  Synthetic
DELRKIAEEVRKRLEDSVRTTRDIIRRVKRENEEVIKELERVMRKVREDLKRVKEEIER

SEQ ID NO: 19199 - protein, 59 aa, Artificial Sequence
  Synthetic
SREEVAKEVRELIARSEKETRDIIREVEDRMRRSKEETEEVIKEVKRLLEEVKKRLEEK

SEQ ID NO: 19200 - protein, 56 aa, Artificial Sequence
  Synthetic
AEEILRTVKKVVDRDRELAKRLLDEARELVRTNRELVKRVLETVTRLVKKIDDEAR

SEQ ID NO: 19201 - protein, 60 aa, Artificial Sequence
  Synthetic
DEEEVEKRVKDLLRESTERTKEVNERVRRLAEESRKRTEEIIREVRRLAEEVEERLRRRG

SEQ ID NO: 19202 - protein, 56 aa, Artificial Sequence
  Synthetic
VRELLETVKKLVKDDVDIVRRNLEEVKKLVETNVRLAEEVLKEVDRLVKKVEEDAR

SEQ ID NO: 19203 - protein, 57 aa, Artificial Sequence
  Synthetic
DELDEIRKRVEELIKRSEEDSREVRRRLEEIIERNRKISRDVEREIEKLIKDVRDSN

SEQ ID NO: 19204 - protein, 62 aa, Artificial Sequence
  Synthetic
GEELRRVEEVVKRVRELVERSKEETDKIAEDVRRLLKESNDDTERIKRKVEEMLKELEERIK

SEQ ID NO: 19205 - protein, 57 aa, Artificial Sequence
  Synthetic
RELDEVVKTVRKLVDESKKESDDVAREARELLEKLERESEEVVRRVRELVKELKKKR

SEQ ID NO: 19206 - protein, 56 aa, Artificial Sequence
  Synthetic
VDEVLRKAKELIDDSRRLIEDVKRRLKELIDRDRRLIERVLEEAERLIRELDEEAR

SEQ ID NO: 19207 - protein, 60 aa, Artificial Sequence
  Synthetic
KEIEELDKMVEDIVRELDELVRAHTETVDRLIRDLERSNEELRKLIKKIVDELEDLVRRG

SEQ ID NO: 19208 - protein, 62 aa, Artificial Sequence
  Synthetic
EEVVRRLKDVERKVKKLAEDVKEKLRRSVERVTKLLKEVEDNSREVEKEAEERVDRVLKKVK

SEQ ID NO: 19209 - protein, 56 aa, Artificial Sequence
  Synthetic
REVEELVERIERSSRRALERLEDLDRTIKKSSEDARRRLKEMDDRLEELVKRARDN

SEQ ID NO: 19210 - protein, 56 aa, Artificial Sequence
  Synthetic
EEEIKKVLEEDRKLVEKLERDNKRVLDEDKELVRRNEERNREVLERIRELIERART

SEQ ID NO: 19211 - protein, 56 aa, Artificial Sequence
  Synthetic
DEVEKLIKDIRDIIRRVEEAVARLVEENNKLVKEVDDRLRELSKENRDIVRKVREG

SEQ ID NO: 19212 - protein, 60 aa, Artificial Sequence
  Synthetic
KRTLLEEAKRVLEDIEKEARDLLRRLEEIIRRTRKLVKDILDRSRDILRRTRELVDRVRR

SEQ ID NO: 19213 - protein, 57 aa, Artificial Sequence
  Synthetic
KEAEDLLRRIEDLIRKVKKEVEDLVRENNRLVEKVVRELEKLSDELRKLIKRIKDAG

SEQ ID NO: 19214 - protein, 60 aa, Artificial Sequence
  Synthetic
KETLLRDIERIRREIEKLIEELLRRAEEIIRDTERLVEKILRESKELLKEIRELAEREKQ

SEQ ID NO: 19215 - protein, 59 aa, Artificial Sequence
  Synthetic
DLERVVEESSRLVERVVRRNKKVVEDIRRRVREVERKNEEVTKEIKKILDEVRRRLERD

SEQ ID NO: 19216 - protein, 59 aa, Artificial Sequence
  Synthetic
REELKKLLERSREMLEKSERTVDTSREEAKRVLEESEELVERTLREVEEIIRRVIERVR

SEQ ID NO: 19217 - protein, 60 aa, Artificial Sequence
  Synthetic
SLEEVLRAVRKLAEDVKRKNKEVLDRIRDSSRRSEEKLEDSLRKIEELVRKLEEELKRDG

SEQ ID NO: 19218 - protein, 59 aa, Artificial Sequence
  Synthetic
DEDLKRLLEEIKRVLEESEEKVERSLREMEEVDKETEKRSRKLNREVREVVKDVADKVR

SEQ ID NO: 19219 - protein, 60 aa, Artificial Sequence
  Synthetic
SRLEDLLRKVKKVLDEIRRTIEKSLEDVRELIKRIERTIEKLLERSRDVVRRVLEDAERR

SEQ ID NO: 19220 - protein, 59 aa, Artificial Sequence
  Synthetic
EKAKEVLKEVKDRVDEVAKELTDVNRDIRRIVDELRRRAEKVVRESRELSRELREELEK

SEQ ID NO: 19221 - protein, 60 aa, Artificial Sequence
  Synthetic
SELERLLEEVEKELRKIERTITELLRRSRELLEEIERAIKESLRDSERLLREIEDTVRKR

SEQ ID NO: 19222 - protein, 59 aa, Artificial Sequence
  Synthetic
SKVREVLREVRERVKEVVERLKRVVEESRKRSEEVKKKLEEVNRRSEEESKRVKEELKK

SEQ ID NO: 19223 - protein, 60 aa, Artificial Sequence
  Synthetic
KLEEVLRTVRKLVEDLREELERVVRTSRELTRRLEEELKEVVKRSEDLSRRLEEILKRDA

SEQ ID NO: 19224 - protein, 55 aa, Artificial Sequence
  Synthetic
TEALKEVKRLVDEIRKTIEEALRDSKRLVDEIRETIKRSLEEVEKEVRKAEERIR

SEQ ID NO: 19225 - protein, 59 aa, Artificial Sequence
  Synthetic
SIEDVLRAVEKLLRDLKRRSEEVVKHSETELRRLLEEVRRVLEHSREALERLEERIKDV

SEQ ID NO: 19226 - protein, 59 aa, Artificial Sequence
  Synthetic
DEVIKEILERVKKLIEEIDERNKELNERTKELIKRIKDRLKELNDKTEKAIDKIRKEVE

SEQ ID NO: 19227 - protein, 59 aa, Artificial Sequence
  Synthetic
SIEEVLREVEELLKELEKRARDVLRHSEELLRDVIRRSEEVVKHSEDLLRKLKEAAKDV

SEQ ID NO: 19228 - protein, 59 aa, Artificial Sequence
  Synthetic
DEELKKILDEVRKVIKELEDKLRKLNKKTEDVIRELIERNDRLNKDTKRVIDELKEKVR

SEQ ID NO: 19229 - protein, 59 aa, Artificial Sequence
  Synthetic
SIEEVVEEVKELLERLIRRSEDVLRHSKKLLEELERKSERVVEHSEDLLRKLEEKIKDV

SEQ ID NO: 19230 - protein, 59 aa, Artificial Sequence
  Synthetic
DETLKRILEEVREVIKKLIKSSEDVNRETEELIRRLEDRNRKLNEKTEKVIREIEEEVK

SEQ ID NO: 19231 - protein, 59 aa, Artificial Sequence
  Synthetic
TVEDVLRELRERLKESEKRDRDSVRKAEELLRRSEKRTDDVVKHSERLLEELEEAVRRI

SEQ ID NO: 19232 - protein, 59 aa, Artificial Sequence
  Synthetic
EDVVRRLLEEVEELLRRNVKKSEELLKEIRERLEDNIRKVEKVNRDNKREIEEILRRVK

SEQ ID NO: 19233 - protein, 59 aa, Artificial Sequence
  Synthetic
TVEEVLKEAEDLLKESKERSEDSARRAEEILRRSEERTRKVVEHSREMARRLMEKVKEK

SEQ ID NO: 19234 - protein, 59 aa, Artificial Sequence
  Synthetic
EKVVEDVLREVEKLVRDNIEHSKRLLDEIRRRVEENIRRVDEVNKRNEELIREVEERVR

SEQ ID NO: 19235 - protein, 60 aa, Artificial Sequence
  Synthetic
SKVEEILERVKRLIEENIKRSEEILEEVRRLIRENTEVSKKLLEEVKREITELEKEVRED

SEQ ID NO: 19236 - protein, 59 aa, Artificial Sequence
  Synthetic
ERVKDVLRRLKKIVDESKRRSDKVNKEIEDRVRESEKKSRKVNEDIKRLVKRVADEVER

SEQ ID NO: 19237 - protein, 60 aa, Artificial Sequence
  Synthetic
SDIEDLLKKVEDLIRRNIETSRRLLEEVRKLIEENIRLAERILEEVRRLIEELARLTRED

SEQ ID NO: 19238 - protein, 59 aa, Artificial Sequence
  Synthetic
EKVKDALRRLRDLIRRSKEDSERVNEEIKDIVRKSRETSEDVVRRARELLDKVRREVEK

SEQ ID NO: 19239 - protein, 60 aa, Artificial Sequence
  Synthetic
SELEELLKEVAKLIKRNKDRVRKILDEVRKLIKRNEDVSRRLLEDVERLIKELEREVRED

SEQ ID NO: 19240 - protein, 59 aa, Artificial Sequence
  Synthetic
KKVEDILRTLEELIRESERTSEEVLRELREEAEESKRKSKRVNDRIRELVEKVDREVDK

SEQ ID NO: 19241 - protein, 60 aa, Artificial Sequence
  Synthetic
SKLERLLEEVEKLIRRNKRIVREILREVRELIERNIRVSEEINRRNRRLIEEIRRLVEED

SEQ ID NO: 19242 - protein, 59 aa, Artificial Sequence
  Synthetic
ERVKRILKEIERLVEESKRESERVLEEIKELVKDSKRRSKEVNDHSKKLVDEVREAVKK

SEQ ID NO: 19243 - protein, 59 aa, Artificial Sequence
  Synthetic
SRIDELLKEIRKVTEKTRRDVERLLEEIRKVTDKSRKDSERSLDEARKVLDTIRKLLED

SEQ ID NO: 19244 - protein, 55 aa, Artificial Sequence
  Synthetic
EALERIKRSSEELAEEVKRVLDEVRRSSEELEKRARDSLRELRELVKRVEEEARK

SEQ ID NO: 19245 - protein, 59 aa, Artificial Sequence
  Synthetic
SRIEKLLDEIRKVSKKSIDEVRKILEEVEKVTRDSIRKLRKLLREIEKVLEEIERLLKN

SEQ ID NO: 19246 - protein, 55 aa, Artificial Sequence
  Synthetic
EALKRIKELSDEVREEVKKVLRKIEESSERLEEEAKKVLDTVRELVERVARRAKE

SEQ ID NO: 19247 - protein, 60 aa, Artificial Sequence
  Synthetic
REAEEALRRVEEVVRRSKTELKKLLEDVRRLIEESERELRDLLRRVEEVIRRIREELRER

SEQ ID NO: 19248 - protein, 56 aa, Artificial Sequence
  Synthetic
KEMLRTVDELLKDSERDSERVLREIEELLERSKRKSEEVLREIERLLEKIEREVRK

SEQ ID NO: 19249 - protein, 57 aa, Artificial Sequence
  Synthetic
SEVEEVAREVDELVKESRDESRRIVEEAKRLLKESNKSVKDIERDARRLVKEVEDAV

SEQ ID NO: 19250 - protein, 56 aa, Artificial Sequence
  Synthetic
VKKVLDEVRELAERSKDLNRRLLERIRELVRRSKERNKELLKRLRDLVERVKREIK

SEQ ID NO: 19251 - protein, 57 aa, Artificial Sequence
  Synthetic
DEVEEVKKDAERLNKELHESLRRSNEEAKRLLKESKDASREVVKDARRLTKELRETM

SEQ ID NO: 19252 - protein, 56 aa, Artificial Sequence
  Synthetic
VEKVLRDLRRLTEETKRRNRETLEEIRRLIERSKEEIKRLLEELRELTKRTKDRIR

SEQ ID NO: 19253 - protein, 57 aa, Artificial Sequence
  Synthetic
DEVKEVKDRARKLVEEVKRAVDEVRKRADELNKEVHESLRRSNREAERLVKEVEDTV

SEQ ID NO: 19254 - protein, 56 aa, Artificial Sequence
  Synthetic
VETVLREITELAKKILRDIEELLREITKITEESKRENEKSLRELEDLARRVKEKTR

SEQ ID NO: 19255 - protein, 57 aa, Artificial Sequence
  Synthetic
DEVERLVEELERLLREVRDSVRRSNTEAKELNKEVHEAIRRVVEEARRLLEEVRRTA

SEQ ID NO: 19256 - protein, 56 aa, Artificial Sequence
  Synthetic
VETVLRRVEEVARRVKKLNEDTLRTLRRITEDSLRKIEKLLRDIEKLVREVVERLR

SEQ ID NO: 19257 - protein, 60 aa, Artificial Sequence
  Synthetic
SEIEDLERRIKEVVDDLRRLVEENSKKIDDLLRRLKDLIRKVEEMNRKLIREAEELVREE

SEQ ID NO: 19258 - protein, 58 aa, Artificial Sequence
  Synthetic
EELRKVEESVRRLAEEIKKELEDSRRRVEELVREIEKELEDVNRDARRLVDKVREELR

SEQ ID NO: 19259 - protein, 57 aa, Artificial Sequence
  Synthetic
REVEELKKTLDRLVEESKRESDKVREDAERTVRESEDKSRRVKDEARRSLEEVEEDV

SEQ ID NO: 19260 - protein, 59 aa, Artificial Sequence
  Synthetic
KDEIKKILEEAEEVVRDSKKKIEDLLRHNKKRVDDSLRKIEEILKHNRDEIERVREEIR

SEQ ID NO: 19261 - protein, 57 aa, Artificial Sequence
  Synthetic
DEVETVREEAKRLVEESRKESRRVEEELKKLLRRVEEEARKVKEELEKSVDEVRKAV

SEQ ID NO: 19262 - protein, 59 aa, Artificial Sequence
  Synthetic
REEIKKILERVREVVKRSKDEIREILKEVRKMIDKVRKEIKEILDHNKEVVRKIKEETK

SEQ ID NO: 19263 - protein, 57 aa, Artificial Sequence
  Synthetic
SEVEEVKERAERLVRESEELSDRVRREAEKTIEAVRELVERIRKRLKESVEEVERRV

SEQ ID NO: 19264 - protein, 59 aa, Artificial Sequence
  Synthetic
REEIKKLLEEVKRVVDKSKRDIDELLKHNRRKIDEVLRELEEILRHNETRIKEVLDRAR

SEQ ID NO: 19265 - protein, 60 aa, Artificial Sequence
  Synthetic
SEVEKLLREAEEDVERILKRLEDSMDSNRELVERILETLKRSLDEVEKEIRKIIEELKRR

SEQ ID NO: 19266 - protein, 55 aa, Artificial Sequence
  Synthetic
DKVIKRLEDLLRKVEKVVRDTNRTIKDSIRRVKEVVDTTNREAEKLLRRVEDTVR

SEQ ID NO: 19267 - protein, 60 aa, Artificial Sequence
  Synthetic
SRVEKLLDEVRRLAEDILRDLERSMRSNEELVRKILEKLKESLESNRRLVKRILERLREE

SEQ ID NO: 19268 - protein, 55 aa, Artificial Sequence
  Synthetic
EKVIREVERLIEEVKRVVDDTNRRAEESIKEVRDLVRRTNEEIEKTIEEVDREVK

SEQ ID NO: 19269 - protein, 57 aa, Artificial Sequence
  Synthetic
REAEEIKKALDKLAEELRELLERSRDTVRKLIKELRDLVRESRRRVKELIDDIRRRV

SEQ ID NO: 19270 - protein, 59 aa, Artificial Sequence
  Synthetic
REELKRLLEEVERLIERLKERIKRLTEESEKLVRELLKLIEKSTKESEEDVKRLVDEAK

SEQ ID NO: 19271 - protein, 58 aa, Artificial Sequence
  Synthetic
SEIEDLLRRVRRLIEESEEVIKRVADEVKEIIDRSREKIKRVTEESREIIKRLKKDGK

SEQ ID NO: 19272 - protein, 58 aa, Artificial Sequence
  Synthetic
RRVEDVERDIRRLVRKLREDNKRIAKTIEDLVRELRELNKRSEDETRKLVKELRDAAK

SEQ ID NO: 19273 - protein, 61 aa, Artificial Sequence
  Synthetic
SEVERIKKAVEDLVRKLRKVSKETLDESRELVKELKERDKESEKDSRRLAERLRKLLEEKN

SEQ ID NO: 19274 - protein, 59 aa, Artificial Sequence
  Synthetic
RKVVKDILDEVKKLIDDIEEHSKRVADRNRRLIEKIKKDTEDVIKRNRDLVTEIEKRIR

SEQ ID NO: 19275 - protein, 61 aa, Artificial Sequence
  Synthetic
SEVEKIEERVKRLVEELKKSLKESEEETERLARELRDVDRRSKEESRRLAEELEDLLRRRN

SEQ ID NO: 19276 - protein, 59 aa, Artificial Sequence
  Synthetic
DKVVEELLKEIEEEIRKILETNDKVVKENRRLAREILEDTKRVVDRNRELIKRIAERIK

SEQ ID NO: 19277 - protein, 61 aa, Artificial Sequence
  Synthetic
DEVETIAKEVKELADKLRREVEESRKDSEDLVRKLRESLKESRKRSKDLVDELRKLLERKN

SEQ ID NO: 19278 - protein, 59 aa, Artificial Sequence
  Synthetic
KKVVDDLRKRVEKLIKEIEEDIERVIRRSRKLIEDILRDNERVVKENEDLIREIEERIR

SEQ ID NO: 19279 - protein, 61 aa, Artificial Sequence
  Synthetic
SDVERVEEELRKLLKEIEDSVRESERRLEKLLEDLKRSTEKTKKELKELIDRLEERVRERG

SEQ ID NO: 19280 - protein, 59 aa, Artificial Sequence
  Synthetic
SERVKEILERVRKLVEDVLRRNKRLVEEVERLIEEILRVDERIVREVRELIKRIEERIE

SEQ ID NO: 19281 - protein, 61 aa, Artificial Sequence
  Synthetic
SSVEEVKKTLEDLLRESDKSVRESERRLRELLRESDESVERSRKTLEDLIRELEDLVRKRG

SEQ ID NO: 19282 - protein, 59 aa, Artificial Sequence
  Synthetic
DREVEKILREVTKLIEESLRRDREITEEVRDLIKKSKEKDKEIVDTVRRLIREIKERIR

SEQ ID NO: 19283 - protein, 61 aa, Artificial Sequence
  Synthetic
RSVEEVVKTLEDLLEKLERSVRESEERLKKLLAESDDSVRKSAEELRRLIEELKDLVRREA

SEQ ID NO: 19284 - protein, 59 aa, Artificial Sequence
  Synthetic
EREVKRLLDEVERLIDEIRERDKDIVREVDKLIKDSKREDKRIVDDVRRLIEEIKRRIK

SEQ ID NO: 19285 - protein, 61 aa, Artificial Sequence
  Synthetic
SSVEEVKRELEKLLEDSDRSVEESKKTLRRLLEESNKELRRVAERLKDLIRELKKRVKERG

SEQ ID NO: 19286 - protein, 59 aa, Artificial Sequence
  Synthetic
DREVEEILRRVRKLIEESKTMDKKIVDDVRKLIEESLRDIERIVEDVERLIKEIKERIT

SEQ ID NO: 19287 - protein, 61 aa, Artificial Sequence
  Synthetic
SSVETVEKELRRLIKELRDSVKKSEDDLRRLLEESNRLVREVERRLRELLEKLRKLVEERA

SEQ ID NO: 19288 - protein, 59 aa, Artificial Sequence
  Synthetic
DREVKRILDEVKDRIRRILREDEEIVKEVRRRIKRSEEAIREIAREVDREIEDIERRIR

SEQ ID NO: 19289 - protein, 58 aa, Artificial Sequence
  Synthetic
SEVEELEERARKLLEDVERLTREVEERAKELVKRVKDSSKRSEDEIRRLLRKLLETSG

SEQ ID NO: 19290 - protein, 56 aa, Artificial Sequence
  Synthetic
VEKVIRTLEEEVRRDEEKIREVLERVEDLIREDLRRDEELVKELEKLIREVDEKER

SEQ ID NO: 19291 - protein, 58 aa, Artificial Sequence
  Synthetic
KEVEDLEEELKKLLKEVKTRTEKVVRDAEKSVRDLEKSSRDSDRTLKDLLRRLMETTG

SEQ ID NO: 19292 - protein, 56 aa, Artificial Sequence
  Synthetic
VKKVLDEVRRLVEEDKKRIEEVLKENRESVKRDKELDDRLLERVRELIERALERAR

SEQ ID NO: 19293 - protein, 58 aa, Artificial Sequence
  Synthetic
SEVERLEEEAKRLLEELKRLVERVVREAERSVEKVRDSVRRSEEEARRLLEEITKDDG

SEQ ID NO: 19294 - protein, 56 aa, Artificial Sequence
  Synthetic
VDKVVEDLKDDIRKVKKRIEEVLDENRKSVRKLDEDDRRLVDELRRLVKEVKDKVR

SEQ ID NO: 19295 - protein, 56 aa, Artificial Sequence
  Synthetic
KEVEDLKEELKKLVEELERLVEKNVREARELVKRSEEESRRVAETARRLVDEIRRA

SEQ ID NO: 19296 - protein, 59 aa, Artificial Sequence
  Synthetic
RRTITELLKEVEELVKRVLDAIRKSNREVEKLVRESLRRIEKLLREVEKLVKELLERRK

SEQ ID NO: 19297 - protein, 56 aa, Artificial Sequence
  Synthetic
DEVERLEEELKRLVKEIEDSVRESKKEAEETLRESRKLSREVEERARRLVEELKRK

SEQ ID NO: 19298 - protein, 59 aa, Artificial Sequence
  Synthetic
EREIRELLEEVRKVVEEIKRRDDELVKENRRSIEESKRRIEELLKEVKELVERVTDTER

SEQ ID NO: 19299 - protein, 56 aa, Artificial Sequence
  Synthetic
RDVEEVKKEAEELVKKSEESVRRSKEELERTLKRSREESERVKETAKKLVEKIERD

SEQ ID NO: 19300 - protein, 59 aa, Artificial Sequence
  Synthetic
KETIKRLLDEVRKLVEDSLRHDEELVERNKKSIKDSLDEIERLLREIEELVRKVEEDER

SEQ ID NO: 19301 - protein, 56 aa, Artificial Sequence
  Synthetic
SDVDRVKEDAKRLVEESKRSVDESAKDMRRTLKRSRDESRRVKEELKRLVDRVKES

SEQ ID NO: 19302 - protein, 59 aa, Artificial Sequence
  Synthetic
KDEIRELLERVKKLVDESRRHDKRLVEENRRSARDSLREIERLLREVRKLVEKVLRDRK

SEQ ID NO: 19303 - protein, 60 aa, Artificial Sequence
  Synthetic
DEVETALEEVKELLERVLRKIEDDLRRVRDLLEKLKRTNEELLRKVREEVRRLADLIRKR

SEQ ID NO: 19304 - protein, 55 aa, Artificial Sequence
  Synthetic
ETVKREIEKARETLERLLKRSEEEVDRVKKEVEEISRRVKKEVKKLVDEIRERLR

SEQ ID NO: 19305 - protein, 60 aa, Artificial Sequence
  Synthetic
RRVEEVAKELKRIAEKLKRDIEELLRDDKRLADELRETNKELLRKDKEILDRLAEEIKRR

SEQ ID NO: 19306 - protein, 55 aa, Artificial Sequence
  Synthetic
ETVDRKIDELAERIRRLLEKVKRHVEETKRDVRRVSEEVRKHVEETKRDVRRRLK

SEQ ID NO: 19307 - protein, 60 aa, Artificial Sequence
  Synthetic
SRVEDLVRRIRELVRRDLKRIKDLEEEIKRLAEEIERHSKKVVDELKELADRLRKMLEEG

SEQ ID NO: 19308 - protein, 59 aa, Artificial Sequence
  Synthetic
KEKVDDIRREVKRVVRESEEANKRVRKLVEDIVKRAEDSNRRVEELVRELVEDLKRAAK

SEQ ID NO: 19309 - protein, 60 aa, Artificial Sequence
  Synthetic
SEVDELLKTIEKLARDDVKKIREVVEENKREVRRLEEHSKEVVKEIKDRIKEVLELLRRG

SEQ ID NO: 19310 - protein, 59 aa, Artificial Sequence
  Synthetic
ERVLERVERLVRRLAEESRRANEKSKEDTKRLEDRLKKSNDDLEKLVRDVVTRVREEAD

SEQ ID NO: 19311 - protein, 60 aa, Artificial Sequence
  Synthetic
DEVKELEKRIRKLVREIEEHSKEVVKENRRLVEEDLETIKEVLREIKRRIKKLLELLERG

SEQ ID NO: 19312 - protein, 59 aa, Artificial Sequence
  Synthetic
KDVLKTIKDTVEELVERLKRSNERSREETKKLVKRSREANKRVEDLVRKVVKELREAEK

SEQ ID NO: 19313 - protein, 60 aa, Artificial Sequence
  Synthetic
EEVERIVKEIRDLAEKDKEHSKRVEEEIRRLVEEVERHSRRVEEEIRRLAEELKRLLDRG

SEQ ID NO: 19314 - protein, 59 aa, Artificial Sequence
  Synthetic
EEKLEDLERKVRKLADESREVNDRLRELVERVVRRLEEVNERLERLVEELRRRLEEAKR

SEQ ID NO: 19315 - protein, 60 aa, Artificial Sequence
  Synthetic
DEVEELVERIKRLVERDEREIKRVEDEIERLVRRVDEHSKRVEEEIRRLVTELMELLDRG

SEQ ID NO: 19316 - protein, 59 aa, Artificial Sequence
  Synthetic
ERVVEKVRRLVDKLAERSRDLLRKLRDLVRRVVKRLEDVNRRLEELVRKLAEELKEKSR

SEQ ID NO: 19317 - protein, 60 aa, Artificial Sequence
  Synthetic
SEIEKILDDIRREAEKDLRLSEKIVEDIKRLAERDIKRLREIVEEIEKLLREVSDELRKR

SEQ ID NO: 19318 - protein, 62 aa, Artificial Sequence
  Synthetic
EDAERLIREVEKLVRDLVRESEKSNEEVRKLVEDLVRESDKVLKDVKRLVDEVVRRAREEVK

SEQ ID NO: 19319 - protein, 60 aa, Artificial Sequence
  Synthetic
SRIDEIVKRIEELARRDEEVSREIVKEIRDLAKRDEDTSKRIVEEIKELVKKIKEELERS

SEQ ID NO: 19320 - protein, 62 aa, Artificial Sequence
  Synthetic
EDAKRLLDKVRKTVEDLVRRSRKSNEDVRREVEKLVDRSRKSNTTVERLVRKVVRELRETVR

SEQ ID NO: 19321 - protein, 60 aa, Artificial Sequence
  Synthetic
SRAEEIVERIKKLAEDDKRESDRIVEEIKKLARDIEEAIRRIVKEIRDLVKEVRDVLERE

SEQ ID NO: 19322 - protein, 62 aa, Artificial Sequence
  Synthetic
ERAKELVEEVERLVRELVKDSDRSNKEVRRTVKEIVERAEKLVRDVEEDVERLVRDLKRKVK

SEQ ID NO: 19323 - protein, 60 aa, Artificial Sequence
  Synthetic
SEIEKILKEIEDLARRDEEVSKKIVEDIRRLAKEVEDTSRDIVRKIEELAKRVLDRLRKD

SEQ ID NO: 19324 - protein, 62 aa, Artificial Sequence
  Synthetic
EDAERLVREVEDLVRRLVRRSEKSNEEVKRTVEELVRRMEESNDRVRDLVRRLVEELKRAVD

SEQ ID NO: 19325 - protein, 60 aa, Artificial Sequence
  Synthetic
SEIEKLRKTVERIKEEVKRLSDEHKKRTRELERTSERLVEEHRERTEELRRRIEEIVRKK

SEQ ID NO: 19326 - protein, 56 aa, Artificial Sequence
  Synthetic
IDTLVEEIKELMKEDSERIKKSVKEVDDLAKEDSDRIRDSVRTVKELADEAIRRAK

SEQ ID NO: 19327 - protein, 60 aa, Artificial Sequence
  Synthetic
SEIERLEDRIRRLIRDSRELVKTLKKELKEIIERLEELSERLRREIERVVREVEDVVRKR

SEQ ID NO: 19328 - protein, 56 aa, Artificial Sequence
  Synthetic
IDELLKKLDEIATRDREKIERLREEIRKIARKDEEDIRKLVKEIRDEVRKLKEDAR

SEQ ID NO: 19329 - protein, 55 aa, Artificial Sequence
  Synthetic
SEVEELRELVKRLIERIKRVVETNERDLEELIKRVKDAVKKNKEDLERLIEEIDR

SEQ ID NO: 19330 - protein, 55 aa, Artificial Sequence
  Synthetic
KELLDELKRLIDEVEKKLRESNERVRRLAEEVLRRSKESNDRVRDEARKVKETAR

SEQ ID NO: 19331 - protein, 55 aa, Artificial Sequence
  Synthetic
DEVEALKRTVEELIKRIRKAVEDNERDLERLLKESRDVVKKNEEDLKRLIEEIER

SEQ ID NO: 19332 - protein, 56 aa, Artificial Sequence
  Synthetic
IEKLLRELERVIEEIVRRLEDSNRRVRDIARRDKERSKRSNDRVRRLAEEVKERAK

SEQ ID NO: 19333 - protein, 56 aa, Artificial Sequence
  Synthetic
SEVEELKKLVEELRREIRRLVRENEEDLKKLLEESKRMVERLKELVKKLIEDIRRT

SEQ ID NO: 19334 - protein, 55 aa, Artificial Sequence
  Synthetic
KELVDELKRVADEIVRRIRESNRKVRKIAEEDKTRIKRLLEELERLIADVERRAT

SEQ ID NO: 19335 - protein, 60 aa, Artificial Sequence
  Synthetic
SEVERLLRELERSVTEVKERVRRLVEELERIVREVKKRVDEHKERNKRALEDVKRKVRDR

SEQ ID NO: 19336 - protein, 55 aa, Artificial Sequence
  Synthetic
EEVEKRARKTTEDIKRMADKVTKVAEEVLRRVEKVVEEVREVSRRVVEDIERDTR

SEQ ID NO: 19337 - protein, 56 aa, Artificial Sequence
  Synthetic
KDVEKVIEDIERILTEVRRHSKEILDRIKRILETIREIVKEVKKRNEDLLREARES

SEQ ID NO: 19338 - protein, 58 aa, Artificial Sequence
  Synthetic
KSVEDARRAVERVVREARRSNEEVKRAVEEVAKELERLVKESEDESRRIVEELKKTVD

SEQ ID NO: 19339 - protein, 57 aa, Artificial Sequence
  Synthetic
DEVEEVIKRIRDILRRVEEHSEKILREIEKLLRDATRHSEEVKRRNEKILRDAENSR

SEQ ID NO: 19340 - protein, 58 aa, Artificial Sequence
  Synthetic
EDVKRVRDEVKKVVERVRRSNKKVEDMVREVERRLRESNKESREDSKRIVEEMDRRVK

SEQ ID NO: 19341 - protein, 59 aa, Artificial Sequence
  Synthetic
SEVEKIIDELRKVAEEHKRRVKELVDTNRKVLKEVKDRVRDLVRRVREILKDVSDKARR

SEQ ID NO: 19342 - protein, 54 aa, Artificial Sequence
  Synthetic
EIKEVLKESEEEVRRMLEELEKELRRSRKTVEELLRRLDKTLREVEEAVKRERD

SEQ ID NO: 19343 - protein, 60 aa, Artificial Sequence
  Synthetic
DRVEELLKRVREILERVEREARRLVEEVEDVMRRHKEKLEELVRHNREVLREVSREARRT

SEQ ID NO: 19344 - protein, 55 aa, Artificial Sequence
  Synthetic
EEVKKVLKEVEDTVRELVRRLEKKLKESIDTVERLLEELERVLRESNKTVEDETR

SEQ ID NO: 19345 - protein, 59 aa, Artificial Sequence
  Synthetic
DEVRKILRELREALKRHVEEVKRLLEHNERVLKKVKEDVERLMEEVKRALEDVKRDVDR

SEQ ID NO: 19346 - protein, 55 aa, Artificial Sequence
  Synthetic
KEVRKVLRESEKLIDDLLRELKRVLEETNRRVEDLLRRLEEVLRRVEKTVRDRAK

SEQ ID NO: 19347 - protein, 57 aa, Artificial Sequence
  Synthetic
SLKERLEKVVEESLRRVEEVIKKLERRVEESERRVEELVKTLRDVLRKILRELEKEG

SEQ ID NO: 19348 - protein, 59 aa, Artificial Sequence
  Synthetic
RETVERLLEEIRELLERSRKNVEDLERRIDKLLEDSERNARELLERIRKELRDISEKRK

SEQ ID NO: 19349 - protein, 57 aa, Artificial Sequence
  Synthetic
SMKEEIDRVVREVAENVRDMIRRLKRVLEESLRRVDELVKEIKKVLDDVRRRIEEDG

SEQ ID NO: 19350 - protein, 59 aa, Artificial Sequence
  Synthetic
EETVKRLVEKIRELNERSLDNVKKLLDRIRELLEESERNVKDIVRRIRDLLRRIKEKAT

SEQ ID NO: 19351 - protein, 60 aa, Artificial Sequence
  Synthetic
DEVERVLEEIERMLREVEEHTRRVVEEVRRVLEEVKRHSERVVREIRRLLEELRKLVERG

SEQ ID NO: 19352 - protein, 59 aa, Artificial Sequence
  Synthetic
KDLVRKVEEEVRRVKRELERLNKELEDEVRRIEEAAKRSNEELKKVVDEVKRELEKASK

SEQ ID NO: 19353 - protein, 60 aa, Artificial Sequence
  Synthetic
DEVDEVLKEIRKVLEDVRKHSEEVLREIERVVREVKKHSRKVVEEIKEVVKRLEDLARRG

SEQ ID NO: 19354 - protein, 59 aa, Artificial Sequence
  Synthetic
KRLVDKVRKVVEEVERELKKSVDDVRRVVEEVERRLREVNKEVEDVVREVEERVRRAAT

SEQ ID NO: 19355 - protein, 57 aa, Artificial Sequence
  Synthetic
DEEKEVEKVVRDVEDKLRRLLEENRDVSRKIKRELEELLKELKRSVDDSKEKLERKL

SEQ ID NO: 19356 - protein, 56 aa, Artificial Sequence
  Synthetic
IKTVLEEIKKLAKEAEEEIKRTLERVKKLLEEVRRVVEELLRRNRTLLREIVRKAK

SEQ ID NO: 19357 - protein, 57 aa, Artificial Sequence
  Synthetic
DEERELEEVVKDIERRSKKVVEDNRRVSEEIKRRLEKLLEENRKSAEDSKEMLRREL

SEQ ID NO: 19358 - protein, 56 aa, Artificial Sequence
  Synthetic
VKTIVTEVRDVVRRDKKKAEDTVRTVKELLDRARKKVEKTIRDNRKVLEEVVRKAR

SEQ ID NO: 19359 - protein, 57 aa, Artificial Sequence
  Synthetic
SELERVEKVVREVKKALEDLLRRNKESVDRSRTEARRLLEELRESVRRSEEMVRRKL

SEQ ID NO: 19360 - protein, 56 aa, Artificial Sequence
  Synthetic
VEKVLKEIRDLLREAAERVERSIRRNKKVLDDLKEVVERLLKENERLLREIVEDAR

SEQ ID NO: 19361 - protein, 57 aa, Artificial Sequence
  Synthetic
SAREKLRKVVEEIRRELKRLLEENKKVSDDIRRKLDELLKELEKSVKESIDTLRRDL

SEQ ID NO: 19362 - protein, 56 aa, Artificial Sequence
  Synthetic
VDTIVKELRELLKRAEEEVKKTSDRVADLVRRAEEVVKKLLRENEELLRRIVETAR

SEQ ID NO: 19363 - protein, 57 aa, Artificial Sequence
  Synthetic
SEKEKVEKVVDEVRRRLEDLLRRNRESVRRSDEELKRLLKRNKEVSDEIRKRLRREL

SEQ ID NO: 19364 - protein, 56 aa, Artificial Sequence
  Synthetic
VKTVLREIRELLKEAEERVKKSIKENEDLLDDVRRKVEESTERVERELERVSREAT

SEQ ID NO: 19365 - protein, 57 aa, Artificial Sequence
  Synthetic
DEDREVEEVVKEVEERLRRLLKKNEDVSREIEKRLKELLEKNKRSVEKSEEMLRRKL

SEQ ID NO: 19366 - protein, 56 aa, Artificial Sequence
  Synthetic
VDRVLEEIRELLKRVKEEVERTSRDVKEVLRRAEEEAKRTDDENRKLLEEVVEKAR

SEQ ID NO: 19367 - protein, 60 aa, Artificial Sequence
  Synthetic
DRSKEVVDRLEEELRKVKEDSKESVDRLRRLLEEVERRAEKSLRDSKEVLRRVKEEAERD

SEQ ID NO: 19368 - protein, 55 aa, Artificial Sequence
  Synthetic
RELEKVVRDIIDRVRKMLETSEEVIREVLERVRKVLEENRRVNKDIIDKVEERVR

SEQ ID NO: 19369 - protein, 60 aa, Artificial Sequence
  Synthetic
DEIERLIEEIKTVLDEIRKEAKRMIDENKRLLDEIRELSERVVEENRRLLEEIRDRAEKR

SEQ ID NO: 19370 - protein, 59 aa, Artificial Sequence
  Synthetic
KELADELRKVLKDVRREIEKLVRDAEKSNEDSRREVERLVKRNRESLEEIRKRVEDLVK

SEQ ID NO: 19371 - protein, 57 aa, Artificial Sequence
  Synthetic
SSKETLRKEVERLEKELKKLVDESRRVLEEVEREVRRAVRELEESVKKSAKRLRDRV

SEQ ID NO: 19372 - protein, 56 aa, Artificial Sequence
  Synthetic
VEKLIRRVEELLERVRELVKKNIREIEELLERLRRLVEKVIEDDKRMLKEVEEEAN

SEQ ID NO: 19373 - protein, 61 aa, Artificial Sequence
  Synthetic
REVEELIKRIERLLDEAREHSKEVIRRDEELLRRVRKIIEEIIREIERLLREAEDIARKRG

SEQ ID NO: 19374 - protein, 59 aa, Artificial Sequence
  Synthetic
EELLKRIEDVVRRVVEDLKRLNEEIRRSSEETEKELRRLLEEIRKVVEDVERRVRELVK

SEQ ID NO: 19375 - protein, 61 aa, Artificial Sequence
  Synthetic
DEVREVIKAIRKMLEEAEKHSRDVIRADKELLDKIARHSEEVIKEIRRLLRELEKIAKDKG

SEQ ID NO: 19376 - protein, 59 aa, Artificial Sequence
  Synthetic
EDLLRRIEEEVRRVVEALEKLNRDIEESSRRTEDTARKLNERIREVVEEVMRRVRKLVE

SEQ ID NO: 19377 - protein, 61 aa, Artificial Sequence
  Synthetic
SEVERVIEEIRKLLEDAKRHSDEVIKTDEDILRKVKKHSEEVIREIEKLLEEIEELARRRG

SEQ ID NO: 19378 - protein, 59 aa, Artificial Sequence
  Synthetic
EELLRRLEKLVEDVMRTLKKLNDEIRKSVDETEKTLEELNRRIRKTVEEVRKTAEDLVR

SEQ ID NO: 19379 - protein, 61 aa, Artificial Sequence
  Synthetic
DEVREVIRRIEKLLEDVKRHSERVIREDRKLLRDAERRAKEVIDEIRRVLEEAKEIVRREG

SEQ ID NO: 19380 - protein, 59 aa, Artificial Sequence
  Synthetic
EELLKTITDVVRKVEETLKKLNDEIRKSVEDTMRALKKLVDDLRRVVKEVEDRVREEAR

SEQ ID NO: 19381 - protein, 61 aa, Artificial Sequence
  Synthetic
DVVREVIKTIKKILDEVRDHTRRSIERNEKLLRDIRKIVEDSIRRNRKLLDDAKKVAERDL

SEQ ID NO: 19382 - protein, 59 aa, Artificial Sequence
  Synthetic
EEMVKTLKKVVEDVERELRRLNKEDEDTVREIAEAAERLVRDDERTVREIEEALKELVR

SEQ ID NO: 19383 - protein, 61 aa, Artificial Sequence
  Synthetic
DVIRDVEKKIRDILERVREHTKKSIKENRDILDDVRRHTEKSIKENEDILDEVRRVAERDL

SEQ ID NO: 19384 - protein, 59 aa, Artificial Sequence
  Synthetic
EEMVKRAKDVVDDVARRLEELNREDKKTVEEIVETAKELNERDKETVERIRKKLEDLVK

SEQ ID NO: 19385 - protein, 61 aa, Artificial Sequence
  Synthetic
DAVRKVIEDIKRALEEVRRHTKESIKRNEDILREVEKIARDIIREIRRILERVREVVERDL

SEQ ID NO: 19386 - protein, 59 aa, Artificial Sequence
  Synthetic
EEAVETLKRVVDDVAKKAKELNREDEETVRKIVEELKRLLDELRREVERVADEARRAVK

SEQ ID NO: 19387 - protein, 61 aa, Artificial Sequence
  Synthetic
SVAEEVIRRIEEILKRVEEHTRESIERNKKLLEEVRKHTEDVIRRIRELLERLERVVRRDL

SEQ ID NO: 19388 - protein, 59 aa, Artificial Sequence
  Synthetic
EEMVKRVKDVVDDVVRRLKDLNETDRRTVDEIVKEARRLNDELRKVVEEVEEKARRDVK

SEQ ID NO: 19389 - protein, 59 aa, Artificial Sequence
  Synthetic
DEVREIIERIKKLLDDIRKVAEESIRRNEKLLEEVRKRVRESIEELKRIKEEVEKLARE

SEQ ID NO: 19390 - protein, 59 aa, Artificial Sequence
  Synthetic
EDVVRTIEEVVRRVEKELRRLLEENERVIREIERELKKLVDDNKRVSDEIKDRAERLVD

SEQ ID NO: 19391 - protein, 59 aa, Artificial Sequence
  Synthetic
SEVEDIIRKIEESARRSEKVVRDSIRENRRLLEEVKREVDRSIERLEDIIRKVEEVARR

SEQ ID NO: 19392 - protein, 59 aa, Artificial Sequence
  Synthetic
ERAVDTIRRVVEKSKTVSKKVLDENREVVREVDERVRELVRKNEDVSRKIEERARRLLK

SEQ ID NO: 19393 - protein, 59 aa, Artificial Sequence
  Synthetic
DEEEEVERVVKEAEETIRELLERDKRVVKRLREEADRVLDEVREEVKRSEETAEDLRRK

SEQ ID NO: 19394 - protein, 56 aa, Artificial Sequence
  Synthetic
GEKLIKELEDVLRELEERSRKTLEELKDVLRKVKETIDELIRTNRRELEKLERDTR

SEQ ID NO: 19395 - protein, 59 aa, Artificial Sequence
  Synthetic
SEEEEVAKVVEDVRRRLEELKRAVEEVIRRTDEEAKRLLEADRRVVERVREEVKRLVEA

SEQ ID NO: 19396 - protein, 56 aa, Artificial Sequence
  Synthetic
GKELIKRLRDELKRLEDDARRILERNKKILEDVERESRRTLKELKDVLKELEERAR

SEQ ID NO: 19397 - protein, 60 aa, Artificial Sequence
  Synthetic
SLVEELERVVKDVEREARKLNEHNRENSKRVEDRLRELNEHLRKNTEEVKRRLEELIRKK

SEQ ID NO: 19398 - protein, 59 aa, Artificial Sequence
  Synthetic
EDAIREVLRRIERLLEEVKKKNEETSKRSKELLEENAKRNKEVSDRSKRLLEEIKRRAD

SEQ ID NO: 19399 - protein, 60 aa, Artificial Sequence
  Synthetic
SLTERLREVVRRVEEELKELIRHLRENSERVRKTLEELNRHLKENVEDVKRKLEDLIRKK

SEQ ID NO: 19400 - protein, 59 aa, Artificial Sequence
  Synthetic
KDAVERVIEEIERLLDEVKKTVEELSKTSKKLLDENKKENEDVSRKSEELLKKIADEVK

SEQ ID NO: 19401 - protein, 60 aa, Artificial Sequence
  Synthetic
SLKERLEEVVRRVRKELKKLIEHLERNVEEVRKTLEELNRHLDENVKRVKDTLTRLIEEK

SEQ ID NO: 19402 - protein, 59 aa, Artificial Sequence
  Synthetic
KDEFERVLKRIKEVLDEVKREVEELSKESEDLLRKNEERNKRASDRSEDLLKKIAEEVK

SEQ ID NO: 19403 - protein, 60 aa, Artificial Sequence
  Synthetic
SLLEELEKVVEEVKRSLDEVNKRNKKNTDDVAKTLTDLNEHLERNVRKVEEDAKDLVRKK

SEQ ID NO: 19404 - protein, 59 aa, Artificial Sequence
  Synthetic
EKLAKDVLREIRRVLEEVKRDNDRTSKESKDLLDENKKRNEEVSEESERLLRDIARKVD

SEQ ID NO: 19405 - protein, 60 aa, Artificial Sequence
  Synthetic
DLLEELKDVVDKVRRTLERLNEENRKNVEDVKRRLDDLNRKLEDNVRRVEERARELIKRK

SEQ ID NO: 19406 - protein, 59 aa, Artificial Sequence
  Synthetic
EKAVRDVLKEIEELLRKVTKENKDTSDESRRLVKTNEDLNREASKRSEDLLARVEEKVR

SEQ ID NO: 19407 - protein, 60 aa, Artificial Sequence
  Synthetic
SLTERLAEVVKRAEDLLRKLNEENKKNVEDVERTLRKLNKDLKDSVDRSRREAEKLIRRK

SEQ ID NO: 19408 - protein, 59 aa, Artificial Sequence
  Synthetic
KDAIEKVLEDIERVLREVEKRNRETSRDSERLLRRNEEENRKALERDEKVLKEVADEVE

SEQ ID NO: 19409 - protein, 60 aa, Artificial Sequence
  Synthetic
SLEEALEKIVREVKETLERLNKENRDSVRETADTLRKLNEELRRNVKRVEEALRDLIREK

SEQ ID NO: 19410 - protein, 59 aa, Artificial Sequence
  Synthetic
EEEAKRVLRKIEEDLKRVADINRKTIERDKKLLEDNERKNRKVSEESRELLEKIAKDVK

SEQ ID NO: 19411 - protein, 60 aa, Artificial Sequence
  Synthetic
KEVEEIIEEIKDRLRRLEETVERLLRENREMLRRTREEVKEIIKRIRDLLRELKKIAEKD

SEQ ID NO: 19412 - protein, 59 aa, Artificial Sequence
  Synthetic
KKLVEDVDKVVKEVEDRVRRLIEALKKVSEDLHRENKKLIEELEEVVKEVKERARELTR

SEQ ID NO: 19413 - protein, 60 aa, Artificial Sequence
  Synthetic
DEVKEIIKRIEDLLEDLKRKVERILREDERSLEESRKKVEEILKEIEDVLRKLKKDVEED

SEQ ID NO: 19414 - protein, 59 aa, Artificial Sequence
  Synthetic
ESAIKELRDVVREVKKRAKELIERLRESVERSRETNERLIRELEDVVRRVEETVRRLIK

SEQ ID NO: 19415 - protein, 60 aa, Artificial Sequence
  Synthetic
KKEEKIKRSVERSKEENERLIEELERSIRDTARRAEKLIERLEKVVREVDKRLRELREEG

SEQ ID NO: 19416 - protein, 56 aa, Artificial Sequence
  Synthetic
VETVLREDEDTLRRSEEKVDKLIKDDRRLLEELEDKVRELLRTVKELLKRTEERVT

SEQ ID NO: 19417 - protein, 60 aa, Artificial Sequence
  Synthetic
SSEERLKESIDRSKKRNKEAIEELEKSIRETEKTLEELIKTTRKSIEDVRKRLEDLERKG

SEQ ID NO: 19418 - protein, 56 aa, Artificial Sequence
  Synthetic
IDTLIEEDKETLRRSDEEVRRLIDEDRRLLEEVEKRARESNKEIRDLLRRVEEEAR

SEQ ID NO: 19419 - protein, 60 aa, Artificial Sequence
  Synthetic
SEEDELRESVKDSERRLRRLIEEDKRVVEEVEEENKRLIDKVREVIKRIEDRLDELRRRG

SEQ ID NO: 19420 - protein, 56 aa, Artificial Sequence
  Synthetic
VKEAIRRDRELLKRAEEESRRTLEEMRTSLEESKRRVEELIKTLKRLLDEAEKEAK

SEQ ID NO: 19421 - protein, 60 aa, Artificial Sequence
  Synthetic
SSEEKVEESIRRSKKRLEELIRDVERVVRKVEEDNRRLEEKLRKSIEDTRRKLEELKRRG

SEQ ID NO: 19422 - protein, 56 aa, Artificial Sequence
  Synthetic
FETLIRDDKRLLRKVEEDAKRLIKEIRDSLRESEKRVEELIDRDRRLAKEVEDRAR

SEQ ID NO: 19423 - protein, 59 aa, Artificial Sequence
  Synthetic
SSEERLRESIKRSKKRLEELIREVRKRIEEIRRKNEELIREVEEVIRRIREELKRLRDE

SEQ ID NO: 19424 - protein, 56 aa, Artificial Sequence
  Synthetic
IDELIKEDERLLREVEKKVKEIIKRLDDSLRDSERRAKELIRELEELLREAEERAK

SEQ ID NO: 19425 - protein, 59 aa, Artificial Sequence
  Synthetic
SSEDRLRKSIEDSRKRNEELTRALETVIREIRKRNARLIEEVKKVVEEVKRELERLREE

SEQ ID NO: 19426 - protein, 56 aa, Artificial Sequence
  Synthetic
IDTLIKRDRETLKESEDRVRKLLEDLRRSLRESEKEARRLIEEIRTLLEKVAREAT

SEQ ID NO: 19427 - protein, 56 aa, Artificial Sequence
  Synthetic
SEVEDVLRRIRELLEEVRELVERNLKEIKRLADEIERLAKENLERSRRLAEELRDG

SEQ ID NO: 19428 - protein, 59 aa, Artificial Sequence
  Synthetic
EDAVERVERILRDADEKIKELARESERLNRELDELIKRLVDESRELNRELEEIVRERAR

SEQ ID NO: 19429 - protein, 56 aa, Artificial Sequence
  Synthetic
REVEEVLKKIEDLARELTKKVRKNLEDIKKLAEEIRELAERVLRTSRELIKELRDG

SEQ ID NO: 19430 - protein, 59 aa, Artificial Sequence
  Synthetic
RELLEEVRKILEEMRRRVDELVRRSEELNRKLRELVERLVKELEDLNDEAKKIVDDRAR

SEQ ID NO: 19431 - protein, 56 aa, Artificial Sequence
  Synthetic
REVEEILKKIRTLLEEVKRRVEKNLEDIRKLLKELEDRVRRDLDEIRRLAEELRDG

SEQ ID NO: 19432 - protein, 59 aa, Artificial Sequence
  Synthetic
EKLLAEVRKVLKEAEDKIRELVERSKTINTEVKKEVDRLVEESKKLNKELEDEVDRRAK

SEQ ID NO: 19433 - protein, 56 aa, Artificial Sequence
  Synthetic
REVEEVLKKIRELIETLEELVRDDLRRIEELLRRIEDKVRENLRRIREVIKELRDG

SEQ ID NO: 19434 - protein, 59 aa, Artificial Sequence
  Synthetic
EDLLKRVKELLDDIRRKVDELIDRSRRLLEDLRRRVKELAEESKKLNEEAEKIVEDRAR

SEQ ID NO: 19435 - protein, 56 aa, Artificial Sequence
  Synthetic
KEVEEVLKEIKDIAEEIRELAERDLKRDKELVDEAEDLVRRNLEDIRRVIEELRDG

SEQ ID NO: 19436 - protein, 59 aa, Artificial Sequence
  Synthetic
EELLRRVEKLLEDLKRTVDEMVKRSEDSLRRSEETVRELEERSRRLNDEIRRIVDERAR

SEQ ID NO: 19437 - protein, 58 aa, Artificial Sequence
  Synthetic
SEVDKVVKEIKEKLDEIRKEVEKVVREDERLLEEIERLARKVVRENKELLKDIRREGR

SEQ ID NO: 19438 - protein, 59 aa, Artificial Sequence
  Synthetic
ETVARKLEEVVREVEEEVRRLEEKLKRSVEETEREIRRVVKELEDSVRETEREVRRLSK

SEQ ID NO: 19439 - protein, 60 aa, Artificial Sequence
  Synthetic
DDVEKLVRDIERLVEKVTRDNKKTVDDDKTLVDEARKENEETVERIKRELEELEKRVRKD

SEQ ID NO: 19440 - protein, 60 aa, Artificial Sequence
  Synthetic
SEEATRKLEKVLRDLEEELKRVDRENEKSLRESRKIVEDLDRTNKRVVDELRRIVEELRK

SEQ ID NO: 19441 - protein, 60 aa, Artificial Sequence
  Synthetic
DEIDDVLRKIEDLVRKLRELVKKVLEDSKRLLEEIKRLAKEALERSEELVRRVEELARRG

SEQ ID NO: 19442 - protein, 59 aa, Artificial Sequence
  Synthetic
EEVIRKLEEAVKRAEELVKRIEEELRKVDEEVERLVREIEKELREVNDRLRRLIEEIAR

SEQ ID NO: 19443 - protein, 61 aa, Artificial Sequence
  Synthetic
REIEEALKEIEKIIEDLRKIVEEVLKRLEEIDRELRKRNEDSNREIEKIIEDLKDMVRKKG

SEQ ID NO: 19444 - protein, 60 aa, Artificial Sequence
  Synthetic
SEEAERRAETVLRKLERVVDKVIKDIRKVLKDNERVVREVRKSAEELLDKLRKVVEEVRR

SEQ ID NO: 19445 - protein, 61 aa, Artificial Sequence
  Synthetic
REIEDVLRRIEEIIRELEERNKKSNKEIAEIDKELRDRNRKSNEEIEKIIEDLKEAVERKG

SEQ ID NO: 19446 - protein, 60 aa, Artificial Sequence
  Synthetic
SEEAEKRIRDVLDKLREVVERVIRSIEDMLRRNEKVVREVKESIERALKRLEETVKRVRD

SEQ ID NO: 19447 - protein, 61 aa, Artificial Sequence
  Synthetic
DEIEKMLRDIEEIIKRLRKIVEEVRDTLRRIDEDLRRRNEESNRRLEKIIEDLERVARRDG

SEQ ID NO: 19448 - protein, 60 aa, Artificial Sequence
  Synthetic
DKKAEDEIRKALRKLKEVVKKVLKEIAEMVERNDRELRRLEKSIRESLDKLRETVKRLED

SEQ ID NO: 19449 - protein, 57 aa, Artificial Sequence
  Synthetic
DLVEEIRKTIEKIVREIRKVLDEVRKHTEDVIRDIRRVLKEVERHSREVVKRIRDER

SEQ ID NO: 19450 - protein, 56 aa, Artificial Sequence
  Synthetic
KDELRKLVETLEKVVREVEEELRRLNEELEKVVREVEKRARESNDRLEKVVREVER

SEQ ID NO: 19451 - protein, 60 aa, Artificial Sequence
  Synthetic
SEVDEVVKEIRKLVEDDEREVEKAIRDIRRSNEELRERVERLLEELERLIKEVEETVRRM

SEQ ID NO: 19452 - protein, 58 aa, Artificial Sequence
  Synthetic
EAVEKARKILEEVEKVVTDTEKKLDDIRKHVKEVVDRLRKEIEDVLKRVRDVAERERR

SEQ ID NO: 19453 - protein, 60 aa, Artificial Sequence
  Synthetic
KVEELLKELLDRVKEVVDRIRRELEKALEESRRVVREVEERVKTANREVRKVVDDVRKRS

SEQ ID NO: 19454 - protein, 59 aa, Artificial Sequence
  Synthetic
EEDVRRVLEEIARLVRELEKMVRDVVKTSRDTVRKLREDVKKVVDENRKLAEKLKRDAD

SEQ ID NO: 19455 - protein, 60 aa, Artificial Sequence
  Synthetic
RIRETLTKLLEDVKEVVRETDELLKRLNRRVREVVRETEERLEDLNREVRKVVRDIERET

SEQ ID NO: 19456 - protein, 59 aa, Artificial Sequence
  Synthetic
EETVKDIVRKVKRLLEENRKLAEKITRDNEELLKENKEMLDEVRRRNTELLKRLREEAK

SEQ ID NO: 19457 - protein, 60 aa, Artificial Sequence
  Synthetic
RIEEDATRLIKEVKDVVKETEERARKVNKEVRDVVRDVERRLKELNEEVERVIRDVKRRS

SEQ ID NO: 19458 - protein, 59 aa, Artificial Sequence
  Synthetic
EKIADDVAKEIEDLVRRNREVVTEIEKKNRELVRRLRDMVRKVEEDNKRLLEELKKATD

SEQ ID NO: 19459 - protein, 60 aa, Artificial Sequence
  Synthetic
SVRELVEEARKHSRKVAEESRKLVEDLTEESKRVIDESREKVERLREEIERVLREVKKEG

SEQ ID NO: 19460 - protein, 56 aa, Artificial Sequence
  Synthetic
IERVLEEVEESDKRDEERVRKLEREIRESNKRDKEIVDRLLDELRRIVEELRERAR

SEQ ID NO: 19461 - protein, 59 aa, Artificial Sequence
  Synthetic
SVDEAVDELLKNSEEVIKDTERKARELLRHSREVNKRSERESERLKEEIERVLRKLKRD

SEQ ID NO: 19462 - protein, 56 aa, Artificial Sequence
  Synthetic
IEELVERIKDSNRRDKEIIKDLERKIRESDKRHKERVDDLARRVEEIVKELEEAAR

SEQ ID NO: 19463 - protein, 57 aa, Artificial Sequence
  Synthetic
SEVKKVEKEAEDISRRSRELLEKIREEVERLSRRSEELLKDVERKVRKVIKEIEDKR

SEQ ID NO: 19464 - protein, 56 aa, Artificial Sequence
  Synthetic
EETVRELIRDLRRNTKRVKEEADEMIRHLRENTERVEKRLRELREELKKVVERVRK

SEQ ID NO: 19465 - protein, 57 aa, Artificial Sequence
  Synthetic
EMVDRATEKVRTLSDESRRLLKKVRDENRKTSERSKRLLDEIERRVKEVLKRIRTER

SEQ ID NO: 19466 - protein, 56 aa, Artificial Sequence
  Synthetic
KDRVKRLIEELKENTERVEKSLRDLDRHNRRNTEEVKRSADELIEELKRVVDEVKK

SEQ ID NO: 19467 - protein, 57 aa, Artificial Sequence
  Synthetic
DKADEIEETVRRVSETSERLVEEVRKDNERTSKRSDDLLKDIEDKVRKVLERMRRER

SEQ ID NO: 19468 - protein, 56 aa, Artificial Sequence
  Synthetic
EEKVRRLIKELRDNTKKVAEELKKLDDHNERNVEEVKKRLEELIRRLEKVVEDVKR

SEQ ID NO: 19469 - protein, 57 aa, Artificial Sequence
  Synthetic
DFVKKAKDDVKEVSKESEKLLREIEEEVRRVSKRSRELLETVRRRVEKVLRDMERER

SEQ ID NO: 19470 - protein, 56 aa, Artificial Sequence
  Synthetic
EDRVRELIKELEENTRRVEEKLRKLIEDLKRNVREVEERARRLIEELREVVERVKT

SEQ ID NO: 19471 - protein, 60 aa, Artificial Sequence
  Synthetic
SDLERLKREAEELIERDKRLLRRVEEESRRTLEEDRRSLKESEDRARELIRRIEELAKKI

SEQ ID NO: 19472 - protein, 59 aa, Artificial Sequence
  Synthetic
DEMRDAARRLIEEITRSVEESERELKRLIEEDKRSVERSKKENDKLIEEVRRVVERVTK

SEQ ID NO: 19473 - protein, 60 aa, Artificial Sequence
  Synthetic
DVEEVLRKLKKEVEEVIRRTEAEVAKVLKEVEKVVTETREEVRRVLEEVKRVVDDVRRRN

SEQ ID NO: 19474 - protein, 56 aa, Artificial Sequence
  Synthetic
VEEVRKTVEKLIDDNRRMLEEVVKRAKELIEHNRRVVDKVLKEAKKIVRDLEETVR

SEQ ID NO: 19475 - protein, 60 aa, Artificial Sequence
  Synthetic
SVEEVLKKLLEEVRRVAEETRRRAEKLLDDDRKVAEESKKRAEELLKEVKDRVDDVRRRN

SEQ ID NO: 19476 - protein, 56 aa, Artificial Sequence
  Synthetic
MEKVARTIKKLIKENRKFLEEVEKRSRETLKTNKKVLRDLEKRAKKIIEDLERTLR

SEQ ID NO: 19477 - protein, 57 aa, Artificial Sequence
  Synthetic
KIEELMKRLEDEAKRSLDESEKKLEELRRDSERSVREVEELLKELLDRARRVLEKLG

SEQ ID NO: 19478 - protein, 59 aa, Artificial Sequence
  Synthetic
EEEVKRVAREVEELIERNRRHSDRIAEEVKETLERNREKVRRVLEKLKKELEDVLEKRK

SEQ ID NO: 19479 - protein, 56 aa, Artificial Sequence
  Synthetic
DIEELARRLEEAVKDSLRRVEEKLRRLEDESRRSVEDSDRKLKELIDRVRKVLKDL

SEQ ID NO: 19480 - protein, 59 aa, Artificial Sequence
  Synthetic
DEVVRRVARRIEELLKENDDLVRRVAEEIKRTLKENNEHSDDLRRRIEELIKEITERRR

SEQ ID NO: 19481 - protein, 56 aa, Artificial Sequence
  Synthetic
DIEELLERLRRRVEKSLEDSDRLLRKLEEDSKESVKRVKRLLEELIKRVKEVLKKA

SEQ ID NO: 19482 - protein, 59 aa, Artificial Sequence
  Synthetic
KELVKRALEEIEKRLKDNRDHSRRLAETVKDTLDKNDKKVEEVRREIEELLRRLDEKRN

SEQ ID NO: 19483 - protein, 56 aa, Artificial Sequence
  Synthetic
DIEDLLRELRKRVEDSLKKSEDRLRRLEEKVKRSLDEVEKELKRLLDEAKKVVDKA

SEQ ID NO: 19484 - protein, 59 aa, Artificial Sequence
  Synthetic
DEEVRRVLERIDRLIKRNDDHSRKLEKEIEDLLRRNNREAEEVAKEVEKLLEDLERRRK

SEQ ID NO: 19485 - protein, 60 aa, Artificial Sequence
  Synthetic
REIEEVVKELDDLLRRNDERVKRILDELEELIKKHDRRSDEVTKEIRELLRKLEREVERD

SEQ ID NO: 19486 - protein, 59 aa, Artificial Sequence
  Synthetic
KEARELAEELKKRAKESVDRSKKALEELKKRAREAVRRSREKLKKLKREVEKVVREVRR

SEQ ID NO: 19487 - protein, 60 aa, Artificial Sequence
  Synthetic
DELREILERVRRVLERSKELSEELLRRVEEVLRRLRKHSRDLEEKVRRILTEIEKRARER

SEQ ID NO: 19488 - protein, 59 aa, Artificial Sequence
  Synthetic
KDLREKLDKLRRDLEEVLRRNEEIVREATRRIRKVLDENRKKVEELKRRAERVLEELRR

SEQ ID NO: 19489 - protein, 60 aa, Artificial Sequence
  Synthetic
DDLRRIAKEVEKVLKTSEDLSEELKKEVKRVVDESREDSKRLREEVRKVLEEVKRLADRN

SEQ ID NO: 19490 - protein, 59 aa, Artificial Sequence
  Synthetic
RELKEILKELKKELERVLEDNRRKVKELEDELREVLKRNEKIARELEKELRRVLEEVRR

SEQ ID NO: 19491 - protein, 60 aa, Artificial Sequence
  Synthetic
DELRELEERAKKVVDESRENSDRLAKKVKEVLKRSRELSDELRKEVERVLREIKERARRK

SEQ ID NO: 19492 - protein, 59 aa, Artificial Sequence
  Synthetic
ERLRDILDKIAREVERVLEENRRIVTELKKELEKVLDENRKIVEELERRARKVLKELRD

SEQ ID NO: 19493 - protein, 60 aa, Artificial Sequence
  Synthetic
DELRELLEEVRRMLRESRENSRKLAEEVERVLRESEEDSKKLKRDVEKILEDVRRKLERN

SEQ ID NO: 19494 - protein, 59 aa, Artificial Sequence
  Synthetic
DELRRILDELRRRAKKVLDDNRKIVRDLERELRRVLEENRKIVEELEKLLEKVLEELRR

SEQ ID NO: 19495 - protein, 60 aa, Artificial Sequence
  Synthetic
KELEELAKTVEDLLRENDRLAEEVLRTVDDLLRKNDEISKRLLDTARKLLKELKDLKREN

SEQ ID NO: 19496 - protein, 59 aa, Artificial Sequence
  Synthetic
EDVKRILEKLIRDVEKSLKDVDDRLRELIRRVEESLRRNEEILKEVERRAEEVVEEVRR

SEQ ID NO: 19497 - protein, 60 aa, Artificial Sequence
  Synthetic
DDAERLLEDVRRLLEENDRISEEVLKTVKRIVDENDRLAEELLRTVDELVKRLKELRERN

SEQ ID NO: 19498 - protein, 59 aa, Artificial Sequence
  Synthetic
ERIRKILEKVIKEVEDSLRRNSEIVERAVDRARESVKRVKEIVETVERKIRKVVDEVRK

SEQ ID NO: 19499 - protein, 60 aa, Artificial Sequence
  Synthetic
SEVEEVKDRVTKLLKENDDISKELEERVRRLLEENDRHSREVEKTVRKLLEDLKRLAEEN

SEQ ID NO: 19500 - protein, 59 aa, Artificial Sequence
  Synthetic
KRVKDILRRLVEEAEESLRRNEKKLRELEKRVRESLKRSHKINKELEERVKEVLDRVRD

SEQ ID NO: 19501 - protein, 60 aa, Artificial Sequence
  Synthetic
DEVERVLEEAKKLLDTNDDLLRKLDDTVRKLVEDNNRISEEVRERVERLLRRLEELVRKN

SEQ ID NO: 19502 - protein, 59 aa, Artificial Sequence
  Synthetic
ERVKRILDRVIKEVTDSLKRVEDRLRELIRRVEESLKRNREELRRLEERVKDVLDKARR

SEQ ID NO: 19503 - protein, 60 aa, Artificial Sequence
  Synthetic
DRLEDLLRDVKRLLEENDKHSKEVEERIRKLVEDNNEISRTVARDVEEKLKRLRERTEEK

SEQ ID NO: 19504 - protein, 59 aa, Artificial Sequence
  Synthetic
ERVRRTLEELTRRVEESLKRSHEINRKVIREIEKSMDENKKELERLIDRARRVLEDVRK

SEQ ID NO: 19505 - protein, 60 aa, Artificial Sequence
  Synthetic
SEAEEVLKRAEEILRENNKISRDLEEEVRRLLKENDDLLREVEETVERLLEELKELAKRN

SEQ ID NO: 19506 - protein, 59 aa, Artificial Sequence
  Synthetic
ERVKKILERVIRELEKSLKDNERKLRELEERVRDSLRRVEESLRRLERRVEEVLERVRK

SEQ ID NO: 19507 - protein, 60 aa, Artificial Sequence
  Synthetic
DEMEKLRKDVKKLLEDNNKISRDVEKTVEELLRRNDEHSKEVLKRVEDLLRELKKLKDDK

SEQ ID NO: 19508 - protein, 59 aa, Artificial Sequence
  Synthetic
EDVKRILEELKKRAEDSLRENEKRLRELIREVEKSLRRSHEINRDAERKVRKVLDDVRR

SEQ ID NO: 19509 - protein, 58 aa, Artificial Sequence
  Synthetic
SEIEELLERVKELLKRNRELVERVKRTVEELNKDNDRVVKEIEDEARRLLDELEKIMR

SEQ ID NO: 19510 - protein, 59 aa, Artificial Sequence
  Synthetic
DRMRRIAKKAIDDVRKSVEDSKRILDELRKSTEESVKRTRDILKRVLDEAKKVVEDLRR

SEQ ID NO: 19511 - protein, 60 aa, Artificial Sequence
  Synthetic
DELEELRTRVEKLLKENNDLVREVLKTVKKLNDENRKLVERILREVERLLRELREIAKTT

SEQ ID NO: 19512 - protein, 59 aa, Artificial Sequence
  Synthetic
EEMRKKAEELRKRVDESVKDTRKKLEELRKSTEKSVRDTDRILKDLERRAREVVDELEK

SEQ ID NO: 19513 - protein, 60 aa, Artificial Sequence
  Synthetic
DVEEAVRELRETLDKSVERSERTVRELVKKLETSVEETREEVERVVEELDRVVEEAKKDV

SEQ ID NO: 19514 - protein, 55 aa, Artificial Sequence
  Synthetic
KEVRKEVKELVERDEDLVRKIREKVEKVVKDNKDLLRRIREAAKRVVREIRERLR

SEQ ID NO: 19515 - protein, 60 aa, Artificial Sequence
  Synthetic
STMDEIRRIVEKVLKEDKDLAETADRLNRDSVRRDEELAERNKRTNERVVREIEDRLKKE

SEQ ID NO: 19516 - protein, 59 aa, Artificial Sequence
  Synthetic
KRLEDIVREVKKRLEDSLRDTERIVREVDERNKESLRRSKEIVERVNKLLRDVLERART

SEQ ID NO: 19517 - protein, 61 aa, Artificial Sequence
  Synthetic
SSKEVADELRKKAEKVLDELRKIIRELERKNEDSLRRTEEIVRRLEEEAERVLRDLVRTRG

SEQ ID NO: 19518 - protein, 56 aa, Artificial Sequence
  Synthetic
IEDLRRTVDKLVEEIKDLARKLAKSSDDTVREDEKLVEELRKDVKRIVRKIKKDLE

SEQ ID NO: 19519 - protein, 56 aa, Artificial Sequence
  Synthetic
SAEEVVRELDKELKKVLEDSRDLVRRLEEELRKVLEDNEEVVKEIERSSDDVLRKL

SEQ ID NO: 19520 - protein, 55 aa, Artificial Sequence
  Synthetic
DELLRRVKELVERARRHSERLLEEVKRLVDEIRERSKELLERARRLNEEMKERTR

SEQ ID NO: 19521 - protein, 60 aa, Artificial Sequence
  Synthetic
SDLEELFREVKELVDDNLRKSDKLRRDVEKRVRDNERRSEKVHEDNRRLIEKIERLVRRG

SEQ ID NO: 19522 - protein, 59 aa, Artificial Sequence
  Synthetic
DRVRTLVKELRERAKKSLDDNRRMVEELRKRLEESLRRNKRVVEESEKIAKEVLDKVRT

SEQ ID NO: 19523 - protein, 60 aa, Artificial Sequence
  Synthetic
KDAEDLERRVRELVEENNRVSKRLAEEVTRLVKENEDKVRELEKEVRDRAKELLDMKRRG

SEQ ID NO: 19524 - protein, 59 aa, Artificial Sequence
  Synthetic
ERLKKLVDELRETLERSLRENEKVADELRKRAEKSLEDVKRVVDELRKIVDDVLKRVED

SEQ ID NO: 19525 - protein, 60 aa, Artificial Sequence
  Synthetic
DDLEELFERVKRLLERNNEVSKKLEDDVRKLIEDNERRVERVHRENEKELRRIEDLKRRG

SEQ ID NO: 19526 - protein, 59 aa, Artificial Sequence
  Synthetic
ERVRRLVEELRKLLEDSLEKNKRLVDELRKRAERSLREVRKLVERSKREAERVLEEVRK

SEQ ID NO: 19527 - protein, 60 aa, Artificial Sequence
  Synthetic
SRVEEMFERIERLVRRNNEVSRRVHERNRELIKRNREKVKKVHDDNKKLIDDLRELKRRG

SEQ ID NO: 19528 - protein, 59 aa, Artificial Sequence
  Synthetic
ERVRRLVEEARRLLKKSKDDNRRVVKRSREEVTRSLREVEKLVDESRREAEKVLEEVKK

SEQ ID NO: 19529 - protein, 60 aa, Artificial Sequence
  Synthetic
KELEEAFDRVRRLLEENKRKAEEVHRTNEELVRRNNEKSERVHRENEKEIERLDRAKKRG

SEQ ID NO: 19530 - protein, 59 aa, Artificial Sequence
  Synthetic
ERVKTLLKELRDRLKESRETVKELVDRSREEVKKSKKRNKKVVTDSRRRIKDVLDKVRK

SEQ ID NO: 19531 - protein, 60 aa, Artificial Sequence
  Synthetic
KEAEDMLRKVRKLIKENEKHSREVADEVRKLVEDNDRKVDEVHERNRKLITDLRRLAEEG

SEQ ID NO: 19532 - protein, 59 aa, Artificial Sequence
  Synthetic
ERLKTVVTELEKRARDSLEKSKEINKRLREELKRSEERVERLVRKSEEEAKKVLDDVRR

SEQ ID NO: 19533 - protein, 60 aa, Artificial Sequence
  Synthetic
SEIEKLVEDVRKLVEDNLRHSEEVHRRNRRLIEENERKIDELEKRVRKLVEELRELAERG

SEQ ID NO: 19534 - protein, 59 aa, Artificial Sequence
  Synthetic
ERVRTLVDRLREELKRSLDESEKLNRESRKRVTRSLEKVDDLVRELEKLARKVLEEVKT

SEQ ID NO: 19535 - protein, 60 aa, Artificial Sequence
  Synthetic
SEVEEIFKRVTDLLKRNRDLVREILERSRRLVERNDREAKKILDDARRLIEELEDAVRKE

SEQ ID NO: 19536 - protein, 59 aa, Artificial Sequence
  Synthetic
ERVKKLLDELRERVKRSVEESRRVLDDSRRKSEDSLRRSEELLKRVEEIVERVAREVER

SEQ ID NO: 19537 - protein, 60 aa, Artificial Sequence
  Synthetic
SEVEEIARRVDKLLKDNKRTVDEILKESRRLVKENNELVDKILREVEELLRRLEDEVRKE

SEQ ID NO: 19538 - protein, 59 aa, Artificial Sequence
  Synthetic
ERVEKLLRELEKRVKESVDTSREVLKRSREDSKRSEDRTEKVLREARKRVEDVADKVRK

SEQ ID NO: 19539 - protein, 60 aa, Artificial Sequence
  Synthetic
REVEEIVKEVERLVRENDKVAKEIVDESKRLVEENRKRVEEIRREVEELIRRLEDAVRKE

SEQ ID NO: 19540 - protein, 59 aa, Artificial Sequence
  Synthetic
KRVKDLLEELRKRVKDSRKKSEELLEESERRSKKSLDDTRRVLKDARDIVEKVADEVRK

SEQ ID NO: 19541 - protein, 60 aa, Artificial Sequence
  Synthetic
SDVEEIKKRVKELLEENKRLVETIEREVRRLIEENRRLAKRILDEVRRLLEELKDRVDKD

SEQ ID NO: 19542 - protein, 59 aa, Artificial Sequence
  Synthetic
ERVKKLLTDARKEVERSLRESKKALDELRRIVEKSLRDTERLLRTAEKEVEDVLREVER

SEQ ID NO: 19543 - protein, 60 aa, Artificial Sequence
  Synthetic
SEVEKIFRDVEDLLRRNEETAKEILKTSEELVRRNEELVRRILEEVRDLIRKLREVVERS

SEQ ID NO: 19544 - protein, 59 aa, Artificial Sequence
  Synthetic
RRVEELLRRLAEAVKESLERSERLLRRSEEESRRSLKKTEDILREAREIVRKVAEEVKK

SEQ ID NO: 19545 - protein, 60 aa, Artificial Sequence
  Synthetic
REVEEIVKEVRRRLERNDEVAERIVRESERLVEENNRLVEEILRRVRKLIEELLDLVRKS

SEQ ID NO: 19546 - protein, 59 aa, Artificial Sequence
  Synthetic
ERVEKLLRDLEREVDESRKKSRKLLERSREESDRSLKTTEDILREAERIVEKVEEDVRR

SEQ ID NO: 19547 - protein, 60 aa, Artificial Sequence
  Synthetic
SDVEEIVRRAEKLVEDNDRVAEKIHEDNRRSNKRTLDEVRKILEEVRKLIKDLEDEVRRD

SEQ ID NO: 19548 - protein, 59 aa, Artificial Sequence
  Synthetic
ERVKRLLRRVEKSVRDSKRRSEKLLEDSERSSEKVEKDVRDVLKEAREIVRDVAEKVEK

SEQ ID NO: 19549 - protein, 60 aa, Artificial Sequence
  Synthetic
EEVERIVEDVRRLLEENRELVKRILDEVRKLIKENNRLAREILETVRTELEKLRDLVRKL

SEQ ID NO: 19550 - protein, 59 aa, Artificial Sequence
  Synthetic
ERVEKLLEELERRVEESVEESERVLREAEKIVRDSRKTTEELLEEAKRRVDEVAKEVKK

SEQ ID NO: 19551 - protein, 60 aa, Artificial Sequence
  Synthetic
SSVDEILKDVRRSNKENLDLVEKILRESKKLVEENRRLVKEILDRVRKLIKELLRLVRED

SEQ ID NO: 19552 - protein, 59 aa, Artificial Sequence
  Synthetic
EKVEDVLRRLKRTSERSLEESKKLLEESEKDSDRSRKESEEVLREAEEIVKRVLKEVER

SEQ ID NO: 19553 - protein, 60 aa, Artificial Sequence
  Synthetic
DDVETIVERVRELLEENNRLAREIVERVEKLLKDNDDLVKEILEEVDRRIRKLEEAVKRD

SEQ ID NO: 19554 - protein, 59 aa, Artificial Sequence
  Synthetic
RRVEELLRKLEEDVKRSLEDTKRLLDELKKKVDESRKRSKDVLDKAREIVDRVRRSVEK

SEQ ID NO: 19555 - protein, 60 aa, Artificial Sequence
  Synthetic
SEVEKIVRDVEESNKKTKKKVEDIEEEVKDLVRKNNELVKRILEEVKRLLEELKRVKKDD

SEQ ID NO: 19556 - protein, 59 aa, Artificial Sequence
  Synthetic
ERVKRLLDRLRRTSEEVLERVEEVLKKAEEIVRKSFEDSKRVLRKAEEDVKRVARDVEK

SEQ ID NO: 19557 - protein, 57 aa, Artificial Sequence
  Synthetic
SVDEAAKEAEEIVETVERESRKLLEDSRRIVEEVKKRSEEILEEVRRRVEEVVKESK

SEQ ID NO: 19558 - protein, 56 aa, Artificial Sequence
  Synthetic
LERLLEALRRVIDEDRKRSKKLHEENKRVIERDKEISDKLLDDLRKLVADLRRRAK

SEQ ID NO: 19559 - protein, 56 aa, Artificial Sequence
  Synthetic
REAEELEKEVKKVVDDSKKRLDELDEENRRVDETIKKISEDLTREVKDVIRRIRDG

SEQ ID NO: 19560 - protein, 59 aa, Artificial Sequence
  Synthetic
EELRELVERLRRRLETVNRELERRVRELKRSNDESHRENREVIEELIKELKKVLDDVRK

SEQ ID NO: 19561 - protein, 56 aa, Artificial Sequence
  Synthetic
DELREILRKVEKVVEDIERTSDKLRREVDKVVDDSRRKLEELEKEVKKVIEDIRDG

SEQ ID NO: 19562 - protein, 59 aa, Artificial Sequence
  Synthetic
DRLKEAVKELAKRLKDVHERNKRLIDTLREKLKRINDELERSVRELKKELEEVIDRVRK

SEQ ID NO: 19563 - protein, 56 aa, Artificial Sequence
  Synthetic
DEVEELKRRVDRLVEEIRKLSEELLKRNRDVDREIKKRVKDLEDKVRKVIRDIEEG

SEQ ID NO: 19564 - protein, 59 aa, Artificial Sequence
  Synthetic
RELDEVIKEIRRRLEKVHRDNRRVIDEVRRSNRDSERDIAEAVERLTRLLETVLEKVKT

SEQ ID NO: 19565 - protein, 61 aa, Artificial Sequence
  Synthetic
DELEELRTTVTKLLEDLKKISDDLREEVRRLLEEVEEISKRLEETVRRIIKRVEDIVRRDG

SEQ ID NO: 19566 - protein, 59 aa, Artificial Sequence
  Synthetic
KDVKEVVKKLRDELRRVLERNKEVIDRLREKAREVLEKDRKLVDDLREEAREVLERVKT

SEQ ID NO: 19567 - protein, 61 aa, Artificial Sequence
  Synthetic
DELEEIKKEVEELVKTNERIVDKLREDNKRLVEEVKRISEELEREVRRIIREVREIVKRDG

SEQ ID NO: 19568 - protein, 59 aa, Artificial Sequence
  Synthetic
KDVEKLLRELEEEAKRSLKRNRDVIEKLREENKRLLDDDRRVVEELRKEAKDVLDEVEK

SEQ ID NO: 19569 - protein, 61 aa, Artificial Sequence
  Synthetic
REVDELKKTAEKLIRDDERLVEEVLRTSKKLVREDEDMVRKLRKTIEDLIRRLTDVAREEL

SEQ ID NO: 19570 - protein, 59 aa, Artificial Sequence
  Synthetic
RDVKRVLDEVEKLVEDSKRETERVLRESEERSRRSLEETEKALKDLAKLAEDIKREVEK

SEQ ID NO: 19571 - protein, 61 aa, Artificial Sequence
  Synthetic
REVDELRKRIEDLVRRDEEVARKVLEDVRRLVRRNREKARELLERVEKLVRDLKRVADRDL

SEQ ID NO: 19572 - protein, 59 aa, Artificial Sequence
  Synthetic
EEVKRVLDELRKLVKDSERKTKEVVEKVREDVKDSLRRSEEVLKRVKELVDRVADEVRK

SEQ ID NO: 19573 - protein, 61 aa, Artificial Sequence
  Synthetic
SDLEKLKERVDELIRRDDELVKRVLEESRRLVDRNKKKVDELRRRARKLIEDLKRVADRDL

SEQ ID NO: 19574 - protein, 59 aa, Artificial Sequence
  Synthetic
ERVKELLDRLRKKVEDSREKTERVLKESRELSDRSLERSEEVLERVRREVREVVERLKK

SEQ ID NO: 19575 - protein, 61 aa, Artificial Sequence
  Synthetic
DSLREVEKRIRELIRENEELVKEVLERSKRLVDEDRETAERLRKTVEELLKRLREVADKEL

SEQ ID NO: 19576 - protein, 59 aa, Artificial Sequence
  Synthetic
DEVRKALEDLKRTVDESERRTEEVLKESEDLSRRSLKETEDLLRELEKRVKEVADRVED

SEQ ID NO: 19577 - protein, 61 aa, Artificial Sequence
  Synthetic
SDLDEVRKEVKRLIDENRTLVDEIRRRIEKLIRENKKKVEELRKRAEELIRRLKEVADRDL

SEQ ID NO: 19578 - protein, 59 aa, Artificial Sequence
  Synthetic
RDVKRLLDDLKRLVKESLDETERVLRELRKEVKDSLRDSERALREVEDLVRRIKKRVEK

SEQ ID NO: 19579 - protein, 61 aa, Artificial Sequence
  Synthetic
DEVKKLEEDVRRLIEENEELVRRVKKTSDDLVKRNKEKVEELRKRVEDLIRRLREVERRDL

SEQ ID NO: 19580 - protein, 59 aa, Artificial Sequence
  Synthetic
DEVRKALERLRDEVRRSVTDTDRVLKESEDRSRKSLEDSERVLRELEELVKRILDDLAR

SEQ ID NO: 19581 - protein, 61 aa, Artificial Sequence
  Synthetic
SEVDRLRETIKRLLEENKELVERLRERVRKLIRENEKKVEELRDRAKKLIDRLREVRTRDL

SEQ ID NO: 19582 - protein, 59 aa, Artificial Sequence
  Synthetic
RDVERALKELRDRIEESLRRSEEVLKELEERVKESRDESRRVLEEVRRLVEEIKRRAEK

SEQ ID NO: 19583 - protein, 61 aa, Artificial Sequence
  Synthetic
KDVEDLEREIDRLLDEDRKVVEDLERKIKKLIDDNKRLVDKLREDVERLIRRLREVTEKEL

SEQ ID NO: 19584 - protein, 59 aa, Artificial Sequence
  Synthetic
KKVKEVLDELRKRVDRSLEEAEKALRRLEKLVRDSLRRSEEALERLKRLVDDVKKKVED

SEQ ID NO: 19585 - protein, 61 aa, Artificial Sequence
  Synthetic
SELDEVKRRAKELVDRDKKLVKEVLDTSRELVRRNEELVRRILEEVRKLIEDLAEVTKRDL

SEQ ID NO: 19586 - protein, 59 aa, Artificial Sequence
  Synthetic
KEVKELLDEVRRLAEESRREVERVLRESEKRSRESLKKSEDALERAKKLVEDIKDEVER

SEQ ID NO: 19587 - protein, 60 aa, Artificial Sequence
  Synthetic
SEEDKIREIVDRVLKESEKLIEEIERRVDKVLKRIKELTDEIKKRAEDVIREIEDIVRKE

SEQ ID NO: 19588 - protein, 59 aa, Artificial Sequence
  Synthetic
DELRKVVEEIKRELEKIDKKLEEVVRRIEKKLEDILKENSKAVREIRELLKKVKRELEK

SEQ ID NO: 19589 - protein, 60 aa, Artificial Sequence
  Synthetic
DEVEELKRRVEKLLEEIERLTKTHEDRSRRLIEDIRDSNRKLKEDAERLIKEIEELKRKV

SEQ ID NO: 19590 - protein, 59 aa, Artificial Sequence
  Synthetic
EELKKVVDDLRREAERILRRDEEAVKRSEKLLRDILEHVKRVVDEIREELKRILDRVRE

SEQ ID NO: 19591 - protein, 60 aa, Artificial Sequence
  Synthetic
DEVREIEKRVRDLIREIEKSNRDLEREAKRLIDEIDDLSRKLKEDADKLIEEIKELKKKV

SEQ ID NO: 19592 - protein, 59 aa, Artificial Sequence
  Synthetic
EEVRRVVEKLRRLLKTITEHVKEVLDRLRREAEDALRRDKEVADRIREEARRILEDVKK

SEQ ID NO: 19593 - protein, 60 aa, Artificial Sequence
  Synthetic
DDVKRIEKEVRRLLREIERLTREHEKESRELVREIEELSRRLEEEIKRLIEEIEELRKRV

SEQ ID NO: 19594 - protein, 59 aa, Artificial Sequence
  Synthetic
KEVRDVVKRLEEEIREVLAKDEEVARRSVEALADILRRDKDVVDRIRKLLKEILDRVRK

SEQ ID NO: 19595 - protein, 56 aa, Artificial Sequence
  Synthetic
DREEVVKEIKKRLEDLNRRVREVVKKIDRELEKLLEESKRVVDDLRRRLEELKKRI

SEQ ID NO: 19596 - protein, 56 aa, Artificial Sequence
  Synthetic
ERELERLVKEVEKTNERLLDELRKAAEEVAKRSEDTLRELRDIIKKVEERATDIAR

SEQ ID NO: 19597 - protein, 56 aa, Artificial Sequence
  Synthetic
SKEDVVREIEKTLKDLLDDSRRVVRESEERLKELNRRLREVVKESKRRLDEALRRI

SEQ ID NO: 19598 - protein, 56 aa, Artificial Sequence
  Synthetic
TEELRRLVDKVREDSERTLERDRRLAKEVSDRNKRLVEENRKIVEEVLKTIEELRR

SEQ ID NO: 19599 - protein, 56 aa, Artificial Sequence
  Synthetic
EREKVVKKIKEDLDRLNEEVKRVVDESRKLLKRLNERVEEVIREIRKTLEELTRRI

SEQ ID NO: 19600 - protein, 56 aa, Artificial Sequence
  Synthetic
ERELERLVAEVAERNKKLLKDDKDLARKVAEDNEDLLRRLRDEVEKVRRTADEIRR

SEQ ID NO: 19601 - protein, 56 aa, Artificial Sequence
  Synthetic
SREEVVDELRKRLEELNKEVREVVRESERKAERALEEVEEMVKRVREELEKLKRDI

SEQ ID NO: 19602 - protein, 56 aa, Artificial Sequence
  Synthetic
KDDLRRLLKEVAERNRKLLEDDEELAERVLREVRRLLEELRRRLKEIKERLDEIRR

SEQ ID NO: 19603 - protein, 56 aa, Artificial Sequence
  Synthetic
SREEVVRRADKLLKDLNKRVKEVIERSERKLRELNERVRDVVRKIEKRLEELERRI

SEQ ID NO: 19604 - protein, 56 aa, Artificial Sequence
  Synthetic
EEELKRVITKVLRDNEELLKTDEELAEDVARKNKKLLDDLEKTVKEVMDRAEELRR

SEQ ID NO: 19605 - protein, 56 aa, Artificial Sequence
  Synthetic
SREEVVRDIERRLRELNKRVADVADESRRRLEELNEKLRRVVEESRRRLEELRKEI

SEQ ID NO: 19606 - protein, 56 aa, Artificial Sequence
  Synthetic
DDTLRREVKKVERENERLLEEDRRLVREVTRRNEKLVKDNREIVKEVLERAKELTR

SEQ ID NO: 19607 - protein, 56 aa, Artificial Sequence
  Synthetic
SREEVVKEIKDRLKKLNDDVKRVIKESEDLLRKLNEEVRDVVRKIEETLEELLRRI

SEQ ID NO: 19608 - protein, 56 aa, Artificial Sequence
  Synthetic
EERLKEVVAKVAKENKDLLRRDEELARRVAERNKKLVEDLRRLVEEVRRRAEELRR

SEQ ID NO: 19609 - protein, 56 aa, Artificial Sequence
  Synthetic
SESERVEELLKEVAKRVKEVSDRSKRLLEEIERRVKEVSDESEELLRRIIDEAKKV

SEQ ID NO: 19610 - protein, 56 aa, Artificial Sequence
  Synthetic
ERVVDRVRRELEKLIKDLEENSREVERSLRELIEHLKKNVEDVEREAKRVIDELKT

SEQ ID NO: 19611 - protein, 60 aa, Artificial Sequence
  Synthetic
SLEEKLRRVLDELRKTIETLLKTNKDVLKKLEEDVKRIIRRNEEVLRDLERKVRDLKKKG

SEQ ID NO: 19612 - protein, 59 aa, Artificial Sequence
  Synthetic
ERLKRVVDELRKRAKKLLEDVERVIRKSEEEARRLLREVEKVVRELDREAEKLVEEVRR

SEQ ID NO: 19613 - protein, 60 aa, Artificial Sequence
  Synthetic
SSEETLRDILKKVEERSEETLRHNERVLEEVRKEVERILRRNEEVLRRLEKEAKELKKRG

SEQ ID NO: 19614 - protein, 59 aa, Artificial Sequence
  Synthetic
ERLKRVVDDLERRIRELLERDERVIRRTEEEARRLLDDVRRVVEELDKRAEDVVKEVKD

SEQ ID NO: 19615 - protein, 60 aa, Artificial Sequence
  Synthetic
DEEETLKKILDDVRKVSRDTMEENKTFLEELSKVADKIIRDNEKVLDDHRKAAEELKKRG

SEQ ID NO: 19616 - protein, 59 aa, Artificial Sequence
  Synthetic
ERLKRVVDDIRRSLEELLKRDEEVVEESRKEVKRLEEEVREVVTRSDKLMDELLKKVKR

SEQ ID NO: 19617 - protein, 61 aa, Artificial Sequence
  Synthetic
SEKEEVLREAREEAKDIERRLERLLERDKEVIDRVEKDLERLLRENKKLIDDVRRRVEEEG

SEQ ID NO: 19618 - protein, 55 aa, Artificial Sequence
  Synthetic
EVMDEIRRLAERVERRLREVLERSKKLVDDLRERLKEVLKRIEDLYRRLEEEADR

SEQ ID NO: 19619 - protein, 60 aa, Artificial Sequence
  Synthetic
TAKEVLDEIRKVHEDLNRKIEEVLKHSEDVLREVEERNERSVRHSEDMLRRLEERIDRKG

SEQ ID NO: 19620 - protein, 59 aa, Artificial Sequence
  Synthetic
EEVLRKLLEENKKEIRRLEEELKRLNEEVKKRIKELEDSSRKENDRVRERIRELDERVK

SEQ ID NO: 19621 - protein, 60 aa, Artificial Sequence
  Synthetic
TLDEAARTIEELLREVEERARRVLRHSEKVLDKVRKENEDSLRHSDEVLRRVEREAEKKG

SEQ ID NO: 19622 - protein, 59 aa, Artificial Sequence
  Synthetic
EEVIEKTLRDVERRLRDLEDKLRKLNEEVEKTIRDLRRSSEALNKKVKDLIKKLLDEVK

SEQ ID NO: 19623 - protein, 60 aa, Artificial Sequence
  Synthetic
TLDEVAKEIEELLRRVEEENRKSLEHSERVLDEVRERNERSARHSEEVLRRLREEVRRKG

SEQ ID NO: 19624 - protein, 59 aa, Artificial Sequence
  Synthetic
EKVIKETLDRVRETIKRLIKSSRDLNEEVKRRIRELIESSRKKNEDVKKTIEELLRRVK

SEQ ID NO: 19625 - protein, 60 aa, Artificial Sequence
  Synthetic
TADEVLKEIEDVHRRVNTENRKSIEHSKKVLEEVRRTNEKSIEDIERLLREVEKRIRDKG

SEQ ID NO: 19626 - protein, 59 aa, Artificial Sequence
  Synthetic
EDVLRKALEENERLIRELEESSRRLNERVKELIRELEKSSKRLLDEVKKLIDELREEVR

SEQ ID NO: 19627 - protein, 60 aa, Artificial Sequence
  Synthetic
TLEEVVEEIRRRHEEVNRRNRESVENSREVLERVEEDNKDSLRRIRELLERVARKLDERG

SEQ ID NO: 19628 - protein, 59 aa, Artificial Sequence
  Synthetic
EDAIRDMLRRNEERLRRLIESSEKLNRESRDVIRKLIESSRDLLRKVKETIEKLEEEVR

SEQ ID NO: 19629 - protein, 60 aa, Artificial Sequence
  Synthetic
TLEEVVRDIERVHEEVNESLKRVNETTTDMHRRLNEEAKRVLEEIEKLLKDVEKKIRDKG

SEQ ID NO: 19630 - protein, 59 aa, Artificial Sequence
  Synthetic
EDAVKRELDRNREEIKKLEKRIRDVLKKNKDLIDKVREELKRLLDEVKKRIDKLAEEVK

SEQ ID NO: 19631 - protein, 59 aa, Artificial Sequence
  Synthetic
SLDEAAKEIEELLRRSHEELKRVVKEIRDLLRRSHEELRRALEEIERLLDEVRRKLEER

SEQ ID NO: 19632 - protein, 59 aa, Artificial Sequence
  Synthetic
DETVKELLRRVRKLVRESIEEVKTLLREAEEKVRRNERKVEEILRRVRETIRRLEERIK

SEQ ID NO: 19633 - protein, 59 aa, Artificial Sequence
  Synthetic
SLDEALERIRRMLKRSHDENRRVAEDIKRLLEESHRENERVVKEIRDVLDKLREDAERN

SEQ ID NO: 19634 - protein, 59 aa, Artificial Sequence
  Synthetic
DEDVKRLLDDVRRTVEENIRRSETELRDVKRRVTETIRESERLLEEVKRIIDKLREEAK

SEQ ID NO: 19635 - protein, 59 aa, Artificial Sequence
  Synthetic
GLDEVLKEIRELLKESHDRLRRVLEEIEKLLEDSHRRNEEVVRRIRKVLEEVREKAERD

SEQ ID NO: 19636 - protein, 59 aa, Artificial Sequence
  Synthetic
ERLVKELLDRARDKIRRNIEELERKLRAVEEKVRRTIRESEELLDRVRKIIEDLEREAT

SEQ ID NO: 19637 - protein, 59 aa, Artificial Sequence
  Synthetic
DLDEALKEIERLLEEVERRNKEVLERIRRLLKRSHEELKRVLEEIEKLLRDLKKRVDDG

SEQ ID NO: 19638 - protein, 59 aa, Artificial Sequence
  Synthetic
RDSVRDLLRRAKERLDELIKTSKELLDRARKKVKENEEELRELLKDVRRIIKKLTEEVR

SEQ ID NO: 19639 - protein, 60 aa, Artificial Sequence
  Synthetic
SELEDLLREVKELIDRLIDDSRRLVKTAEELIREAIKRSEDLLEEVKRLIDRVTEMVERG

SEQ ID NO: 19640 - protein, 59 aa, Artificial Sequence
  Synthetic
ERVREVLERIKRLLEELKKRDEDSVREIERLLEELKRRNDRVVDEIRKLLKELAERVKK

SEQ ID NO: 19641 - protein, 59 aa, Artificial Sequence
  Synthetic
DLDEVIRELEKLLKESHEAVKRVIKKSEDLLRDSHKKVKDVIRRSEDLLRKLEEEVRKN

SEQ ID NO: 19642 - protein, 59 aa, Artificial Sequence
  Synthetic
RTLLEELRRRIEELLKENRELLKRHEDKSKKLLEDNERLLREHAKKSDEIRRELRERVR

SEQ ID NO: 19643 - protein, 59 aa, Artificial Sequence
  Synthetic
DEVERAKDVLDELRRRVEEELRRWKETSERLREESERALEKSEARLREAAEKLERVKRN

SEQ ID NO: 19644 - protein, 56 aa, Artificial Sequence
  Synthetic
EEVLRDIREKLRELAERLKRLLDDDKRVLDEVRKANEDLLRKIKEDIEELRKELEK

SEQ ID NO: 19645 - protein, 60 aa, Artificial Sequence
  Synthetic
DEDEEVKRTIEELRKEVEKTLREIEKSLKESEDKSRKHLEEVKKSLKETEEEVDELKKRN

SEQ ID NO: 19646 - protein, 56 aa, Artificial Sequence
  Synthetic
EKVLRELEERVRRLKKELKRVLDDYKRKLEEAERRNRKVLKEYEDSLRELADRLRR

SEQ ID NO: 19647 - protein, 59 aa, Artificial Sequence
  Synthetic
DEDREVRKTIEKLKRDSERHLEEMKRSAEESRKEVDKLLKKIKDSLRRTEERVRRLKKN

SEQ ID NO: 19648 - protein, 56 aa, Artificial Sequence
  Synthetic
EEVLRELRKIVEELRKRNEDVLEEYERILRELKERLDRVLKEYEDRLRELEKELRD

SEQ ID NO: 19649 - protein, 59 aa, Artificial Sequence
  Synthetic
SEAEKAKETIDRLADRVRKLLEEIKRSLDDSRRKSKETVEENEKTLDRMRKEVDAAKER

SEQ ID NO: 19650 - protein, 56 aa, Artificial Sequence
  Synthetic
EEVLRTLEEIIRRLTKELEDVLREYERELRRLEEENKRVIDKTEEEIRRLADRLRR

SEQ ID NO: 19651 - protein, 59 aa, Artificial Sequence
  Synthetic
EEDERADETLKRIKRESDETVKKNERTITELLKRVKRLVDEIRKSLEETARRVDSAKKR

SEQ ID NO: 19652 - protein, 56 aa, Artificial Sequence
  Synthetic
EEVLRKFRKILEEAAELNKEVIDRSRKIIEDASRLLREVLEDYETKLRELKDKLDT

SEQ ID NO: 19653 - protein, 56 aa, Artificial Sequence
  Synthetic
SLKEVIDDLERIIRELEKRNREVIKRVRKIVREAEEKNEDVIRKLKETIERLEREL

SEQ ID NO: 19654 - protein, 56 aa, Artificial Sequence
  Synthetic
SRELRDEIRKIKKKNDEHLKRLEDELRKLLEKSDRHVKELEDRIRKAAKEVKDAKD

SEQ ID NO: 19655 - protein, 56 aa, Artificial Sequence
  Synthetic
SLEDVIRDLARIIEEAERRNKTVLDELRKTIKELVEENEKVLDEDDKKSRELEKRL

SEQ ID NO: 19656 - protein, 56 aa, Artificial Sequence
  Synthetic
SRRLREEIKRLLRESEKHVEDLRREIERIKRENEEHLKKWRRDSERLEKEVEDAKR

SEQ ID NO: 19657 - protein, 56 aa, Artificial Sequence
  Synthetic
DELEKLRDDARRIEEKHRRTVEKDKDVVRRMDKEVKDHVRRLKELAKKLEDDVRKR

SEQ ID NO: 19658 - protein, 60 aa, Artificial Sequence
  Synthetic
KRSVDEVLREITEIVERVMELNDKSVEETRRIVERLKEEIDTVNDEIAKIVRKVIEEIKR

SEQ ID NO: 19659 - protein, 56 aa, Artificial Sequence
  Synthetic
DELERLKEAAKRLADEVKEHVDRSRENAKRLKEEVEEHVKRLEDVARTMDEEVKRR

SEQ ID NO: 19660 - protein, 60 aa, Artificial Sequence
  Synthetic
KESVDRVLKEIEDIVRRLEERLDESNKELKEIVDDVTEKLERVNRKIAEIVKRLSDEIRK

SEQ ID NO: 19661 - protein, 56 aa, Artificial Sequence
  Synthetic
DELEELRRAAEEMEKEVREHVKRSEKNAKDLEKEVREHVKKLREVLRRLTEKVKRR

SEQ ID NO: 19662 - protein, 60 aa, Artificial Sequence
  Synthetic
KEKVDRVLEEITREVERLKKELDESNERLERIVRKVIEELRKVDEDAEERVRRLEEEIRR

SEQ ID NO: 19663 - protein, 56 aa, Artificial Sequence
  Synthetic
DDLDRLREAAERMAREVEDHVRKLKDLIRRVRERVERHVKKLEDDLKRVKEEVDRR

SEQ ID NO: 19664 - protein, 60 aa, Artificial Sequence
  Synthetic
KDKVRKVLEDIKRIVDRLEERIREVDKDLERIVRELMKRLDEVNKRLEDTVRRLSEEIRR

SEQ ID NO: 19665 - protein, 60 aa, Artificial Sequence
  Synthetic
DLIEEIKKLAEDHHRRVKEVLDRNREVAERLKKRVRRIVEENKRLAEDVTRKIKELKRRV

SEQ ID NO: 19666 - protein, 59 aa, Artificial Sequence
  Synthetic
EDLRRVLEELREIVTRNEKEIRDTIRELEEIVKRLKEDNDRSVRELERILEELREELER

SEQ ID NO: 19667 - protein, 57 aa, Artificial Sequence
  Synthetic
DSDEEVRRVLEKVEEDVRRLAKDIRDSVRRSEERIDELVKKLEKSIDESRRRVETTA

SEQ ID NO: 19668 - protein, 55 aa, Artificial Sequence
  Synthetic
ERLLEEIEKVVEDLRRKAEELIEKNERLLRRLEEVAKELDKRNKELLEELIRRNE

SEQ ID NO: 19669 - protein, 57 aa, Artificial Sequence
  Synthetic
SEADKVREVLKRVKEEIDRLVEEIEKVNRDSRREVEKLVEKLRKSLKESKDRIARDL

SEQ ID NO: 19670 - protein, 55 aa, Artificial Sequence
  Synthetic
EELLRKIEEVLRRLTEDAKRLIRRNREILKELRELAKRLDEENKELLDELIKKAR

SEQ ID NO: 19671 - protein, 57 aa, Artificial Sequence
  Synthetic
SMIEKVREVLKEVADRVRRLLEENKKSIDDSARALEELIKRIRESLRKSEEDLKREV

SEQ ID NO: 19672 - protein, 59 aa, Artificial Sequence
  Synthetic
SEFVKRILDEVDEILKRLERRVKEHSRKNREELEKIRKEAEEILRENEELLEKIVRDAR

SEQ ID NO: 19673 - protein, 57 aa, Artificial Sequence
  Synthetic
EMVERLEESIDRSRKELDRLIEENKKVLEEVEERVRRLIEKLKRSIEESEERLRRKV

SEQ ID NO: 19674 - protein, 59 aa, Artificial Sequence
  Synthetic
DEVVRRLNEENKKLLEDIRRRAKDHSRRVREILEDLEREVEKMNEENKDLLERIVRRAK

SEQ ID NO: 19675 - protein, 57 aa, Artificial Sequence
  Synthetic
SMIEALKENIRRSEEEIRRLIEEWRKVSEDIEREVKKLIKELEESIDESAKRLREKV

SEQ ID NO: 19676 - protein, 59 aa, Artificial Sequence
  Synthetic
SDFVRKLLEENNELLKEIKKRVEKVLEESKELLKELREKIRRLNEKNKKLLEEIVRRAK

SEQ ID NO: 19677 - protein, 56 aa, Artificial Sequence
  Synthetic
SEIEKVVKDLRERLKELRESVKRLDDKNRELLERLEREVEEMDRRNEKLLRDLKRQ

SEQ ID NO: 19678 - protein, 59 aa, Artificial Sequence
  Synthetic
EELLRTLEKVLREIAEELERLNRKVRESIRESARRLKRLIEKLERSIRRSAEELRKRAK

SEQ ID NO: 19679 - protein, 56 aa, Artificial Sequence
  Synthetic
DEIDKIVKKLRDILREIEKRAKEVNKRNKELLDELRERVKDLDRTNEELLRELKDS

SEQ ID NO: 19680 - protein, 59 aa, Artificial Sequence
  Synthetic
DKLLKKLKDVLDEIAERIKELIRELRESIKKSAEELKRLIDRVRRSIEESAKRLEDRAR

SEQ ID NO: 19681 - protein, 56 aa, Artificial Sequence
  Synthetic
SELEKILEKLRRIVEELAKSVRKLNEENKELLKRLADSVKKLDDDNKRLLTDLRRR

SEQ ID NO: 19682 - protein, 59 aa, Artificial Sequence
  Synthetic
EELLRTLEDVLRKIAEDLERMNRELKRSIKKSADDLKRLNEKVKRSIERSAEELRKRRT

SEQ ID NO: 19683 - protein, 56 aa, Artificial Sequence
  Synthetic
DEIKKIVEEIKKTLEEIDKSVRELIRRAREILRELEESVRELIRRNSKLLEDLRRQ

SEQ ID NO: 19684 - protein, 59 aa, Artificial Sequence
  Synthetic
DELLKELEDVLKEVAEEIKRLNERLKKVLEEIERTLRELNRRLEENIRRSARALEETRR

SEQ ID NO: 19685 - protein, 56 aa, Artificial Sequence
  Synthetic
SEVEDLLRRIEKILEDLRRSVEELLKRIEDALRRLEEEIRKVTEESKRLLEDLTRR

SEQ ID NO: 19686 - protein, 59 aa, Artificial Sequence
  Synthetic
RELIEEVEKVVKRVEEALKRLNDRVRETLDEVRKRLEDAIRRWREESERIARELEKRTT

SEQ ID NO: 19687 - protein, 56 aa, Artificial Sequence
  Synthetic
SEADEIVRRIEELLKELEREIRKVIRDSERLLKELEDSVRELLKKIRDVLDELTKS

SEQ ID NO: 19688 - protein, 59 aa, Artificial Sequence
  Synthetic
EELLRKLEAVLDKVKKDLKKMIDDWRRVSERIARELEKLNRRVKEELDRVKEALDERTR

SEQ ID NO: 19689 - protein, 57 aa, Artificial Sequence
  Synthetic
SEIDEVVERIKRTLEEAEKRVKKASEDHKRRLDELRKKVEKLIEDNERTLEAVARRK

SEQ ID NO: 19690 - protein, 59 aa, Artificial Sequence
  Synthetic
ERLLRKLRKVVKDVDDRLKELLEENRDVVRRIKEELEKLLEKVRRSIEESRRRMRETRR

SEQ ID NO: 19691 - protein, 57 aa, Artificial Sequence
  Synthetic
SEVDEVLKDIRRILEEARKRVEELDRENKRILDEVREKVKELNERNKEILRAAEERK

SEQ ID NO: 19692 - protein, 59 aa, Artificial Sequence
  Synthetic
EKLLRDAKRVVEEVSKALKDLLKEVEDSVRRSKREMEKLLEELRESVKRSEEELRRTSK

SEQ ID NO: 19693 - protein, 60 aa, Artificial Sequence
  Synthetic
DEVEDLLRRNEELLKRLLEEIKKLTDEHREELKRLAEDVKKVVEDVRRLLKELEEMVRRG

SEQ ID NO: 19694 - protein, 59 aa, Artificial Sequence
  Synthetic
EKLVRKLEESVRRSTEELEKALKRNNDVIRRIAEALDDLLRRLEKVIREIEKKLRDDTR

SEQ ID NO: 19695 - protein, 60 aa, Artificial Sequence
  Synthetic
DRVEEAVKDIERLLRELKRDVERLVRENEKILKDAKREVDELTKDHRRKVEELDEMVKRG

SEQ ID NO: 19696 - protein, 59 aa, Artificial Sequence
  Synthetic
EDLLRKLEKVVRDVEKKLRKLLEDLKRSIDRSTRELEKLNEKNNEVIRDIERRLDEAET

SEQ ID NO: 19697 - protein, 56 aa, Artificial Sequence
  Synthetic
SEIEKLIEEIRRVVKEIKREVERAIRENEKLLRESKRRNDELIKEIERVVEELKKR

SEQ ID NO: 19698 - protein, 58 aa, Artificial Sequence
  Synthetic
RLIEELEKVLRDVEKVARDVLRKLRRSIEESRRRSEELNKTVKKVLEDVARTATERSR

SEQ ID NO: 19699 - protein, 57 aa, Artificial Sequence
  Synthetic
REIEEAIKDVERVLRESEERNRRLIERIKRMLKKSEDENRKFIEDNKRLADDLRRRN

SEQ ID NO: 19700 - protein, 58 aa, Artificial Sequence
  Synthetic
EDVERLRKVIEEVKRRMKELNERLKEELREVAKRSRDLNKELRESIEESADRARRRRK

SEQ ID NO: 19701 - protein, 57 aa, Artificial Sequence
  Synthetic
DEIERLREDIKRVLEESTRRNKKLLDEIRKALDESRRKNEEAIRRNEEVVRDLKDRK

SEQ ID NO: 19702 - protein, 58 aa, Artificial Sequence
  Synthetic
DKVRTLRRELEEVARALEELNRRVEEELDEVRKESERLNKELEDSIRKSAEDAKRTTK

SEQ ID NO: 19703 - protein, 60 aa, Artificial Sequence
  Synthetic
DEKDKAIEDVRDLLRRNEEVARRMDKRLKDLLDTIRKKAEDLDRELKRLLEEAERLVREG

SEQ ID NO: 19704 - protein, 55 aa, Artificial Sequence
  Synthetic
KELEKVLEEIRRRSEELLKHHAEVIERIERDVERLRRHHEDTIRKIKEKVDRDRK

SEQ ID NO: 19705 - protein, 60 aa, Artificial Sequence
  Synthetic
DEDREAIKEVEKLLRDNERVARRLDEEVKELLDEMRRRSEEMDRELERLLEEAKRLADKG

SEQ ID NO: 19706 - protein, 55 aa, Artificial Sequence
  Synthetic
EELKEVLREVDKRSKELLKHHKRRIEEVRKRVRELNKHHEDVIRKIKKKVREDRK

SEQ ID NO: 19707 - protein, 60 aa, Artificial Sequence
  Synthetic
KEAEEAIKRVEDLLRRNKEVAERIIREIRRLLREADETSKRMDEDLRRLLREAEDLVRRG

SEQ ID NO: 19708 - protein, 55 aa, Artificial Sequence
  Synthetic
RELDKVLERVKRESDRLLKEIEKVVREVEERLRRLNEHHEKVIREIEKKLEDDRR

SEQ ID NO: 19709 - protein, 60 aa, Artificial Sequence
  Synthetic
DEDREAIERVRRLLDENRKVVEELDERLKELLRDAEEKSRRVIKTLRELLKEIEDLARRG

SEQ ID NO: 19710 - protein, 55 aa, Artificial Sequence
  Synthetic
DELRKVLEDVERASKELLDHHRDVIRRIEEELKRLNKELEKVIREIERAVEELER

SEQ ID NO: 19711 - protein, 60 aa, Artificial Sequence
  Synthetic
DEDRDAIRKVEDLLRRIEEIVRRLIEEVKRLLEDNRRKSKRFIERVDELLKEMEKLVREG

SEQ ID NO: 19712 - protein, 55 aa, Artificial Sequence
  Synthetic
KELEELLRRVEREVEKLLTDLRRLLREVKETSKRLNEELKRRADEVEKKADEDRK

SEQ ID NO: 19713 - protein, 61 aa, Artificial Sequence
  Synthetic
SSKDRIRKVLEEVRETLDRLAKRIEKSLRDSAKRVEDLAEENRTSLKETKERIDELIKRRK

SEQ ID NO: 19714 - protein, 55 aa, Artificial Sequence
  Synthetic
EELIRRIEEELKRIEDTVEKIIRKDEKLLEDIERESERHIREDKELLKELEKEER

SEQ ID NO: 19715 - protein, 61 aa, Artificial Sequence
  Synthetic
SSDKEIEDVLRKVKDELDKLARALDESLKRSEKDIDRLEEELKESHDRTREEIRKLIEERN

SEQ ID NO: 19716 - protein, 55 aa, Artificial Sequence
  Synthetic
DELIREIKKVLDRIREEIERLLREDEELLERLREDAKRILDKNKELLDELRRRVK

SEQ ID NO: 19717 - protein, 56 aa, Artificial Sequence
  Synthetic
SADRKLEEVLKKVEDDIRDLERRLKRSLDESKREVERLERENRRVLEEVEKKVRAD

SEQ ID NO: 19718 - protein, 59 aa, Artificial Sequence
  Synthetic
EETVKRIIEKIERILRKLKRDAERILDKDRKLLKKLEEESRKHIEDVKRLLEELERRTR

SEQ ID NO: 19719 - protein, 56 aa, Artificial Sequence
  Synthetic
ELEEKLKRSLEDSRRRVEELRRTNEEVLREVEEEIRRLIKENEDSLRESKKRVDDR

SEQ ID NO: 19720 - protein, 59 aa, Artificial Sequence
  Synthetic
KETVDKILEDDKELLRRLEEESKRHIDEVRKILEDLERRSRRHIEEDKKLITELEKETK

SEQ ID NO: 19721 - protein, 56 aa, Artificial Sequence
  Synthetic
DLDERLRRSLKRSKEEVERLRKENEEVLRRSKETTKELIKTNEKVLEDVERLVRES

SEQ ID NO: 19722 - protein, 59 aa, Artificial Sequence
  Synthetic
RETVEKIIKEDEDLLRKLKEESDRHIKDVERVARENERESKRHIEEVRKVLDELREETR

SEQ ID NO: 19723 - protein, 56 aa, Artificial Sequence
  Synthetic
SAEEKLEEVLKRVAERIEELIRRNRRVLDRVREEIKRLVEENRKSLDESERRVRER

SEQ ID NO: 19724 - protein, 59 aa, Artificial Sequence
  Synthetic
EETIERIIKKIEDILRKLEEESERHIRRVEEELKEMEKRSREHIEEDKRLLEELERRTK

SEQ ID NO: 19725 - protein, 56 aa, Artificial Sequence
  Synthetic
SAEDELRKVLEKVREDIDRLADENRKVLKRSKDETKRLIKENREVLERVEEIIRRD

SEQ ID NO: 19726 - protein, 59 aa, Artificial Sequence
  Synthetic
EEAIERIIRRIREILERLRKKSEEHIRRVEDVARRNEEESREHIKTVEKILEELKRKAD

SEQ ID NO: 19727 - protein, 56 aa, Artificial Sequence
  Synthetic
SEVEELIKRLKKVLKELVDKVRKVIEDTKELLERLKRRSEDHIRKLREVLKEAKDQ

SEQ ID NO: 19728 - protein, 59 aa, Artificial Sequence
  Synthetic
EELDRRIEKVLKEIEEKIREVIKEWERVHREVNELLKRLIDENRKVLDEIRKLLEEKSK

SEQ ID NO: 19729 - protein, 56 aa, Artificial Sequence
  Synthetic
SEAEDLIRRLKEVLDELKKKADDLIRDTKRLLDEIRKKSEDHIKRDKELLKDLKRR

SEQ ID NO: 19730 - protein, 59 aa, Artificial Sequence
  Synthetic
DRALREIEKVLKEIKELIEKVIRDWKRVHDEVNEELRRLIEKNRKSLKETADELDRKRK

SEQ ID NO: 19731 - protein, 56 aa, Artificial Sequence
  Synthetic
SEVEKLIKEDKELLERLKRDVERLIEELRRTLKELKKESEKHIEDDKRLLDDLRDR

SEQ ID NO: 19732 - protein, 59 aa, Artificial Sequence
  Synthetic
DKLITDIRRSLDETRRRIEKLIREIEKVLREIEETLRELEKRNRESLERTRETLERKSK

SEQ ID NO: 19733 - protein, 60 aa, Artificial Sequence
  Synthetic
SEVDELIERDKKLLRDVERDVRRLNKEVRDILDEIRKDVEDALKENKELLDRLREMVKRG

SEQ ID NO: 19734 - protein, 59 aa, Artificial Sequence
  Synthetic
REVLKRLEDSSKDTTDKLRELLRSHKKVIDEVREKLKELLDRYRKVSDEIREEIDRARK

SEQ ID NO: 19735 - protein, 60 aa, Artificial Sequence
  Synthetic
SEVEKLIEDDRKLLEDAEEEVRRNNREIERILDKAREDVKRIIKEIEDLLREADEAAKRG

SEQ ID NO: 19736 - protein, 59 aa, Artificial Sequence
  Synthetic
EEAKRRIKKSIDDSRRELKRLLESNRKVIEEVKKTLEELIRTLEEVVRRVEDRLKKLAD

SEQ ID NO: 19737 - protein, 61 aa, Artificial Sequence
  Synthetic
DSVEELLKRLRDLLEESKRRAERLIREIERLLRESEKRVRELNRRLEELLREAEDRVRKEG

SEQ ID NO: 19738 - protein, 59 aa, Artificial Sequence
  Synthetic
EDALRKLEKVIREIEREHRRLLEEIRRVLKEVDKRHDEVRKSHEDVIRRIEERLERLKK

SEQ ID NO: 19739 - protein, 61 aa, Artificial Sequence
  Synthetic
DSVERLIEEIRRLLKRSEEIARKLIRDAEKLLEEHRRRVEELNREIERKLEELDEKARRRG

SEQ ID NO: 19740 - protein, 59 aa, Artificial Sequence
  Synthetic
REALEKIRKVIKEVKDTHRDLLRRVRDVIRRIREASKETERSHREVIERVRKRLDELTK

SEQ ID NO: 19741 - protein, 61 aa, Artificial Sequence
  Synthetic
KSVDDIIREIRKLLEDHKRRVDELLERLKKLLEDHRRTVDKLIKDLERLLEELARRVKREG

SEQ ID NO: 19742 - protein, 59 aa, Artificial Sequence
  Synthetic
REALERIREEVRRVEEASERTLRELEKVVRRIERESEKLKRELEKVVEDAKRTLEKLIE

SEQ ID NO: 19743 - protein, 61 aa, Artificial Sequence
  Synthetic
SSIEKLLEELKELAKRHEDEVKKLIRELEDLARKHKERSEKLNEEIKKLLKELADRVRERG

SEQ ID NO: 19744 - protein, 59 aa, Artificial Sequence
  Synthetic
ERVRRRLRKVVEEIKERSDRTIREMEKVIREIKEESRRLNKSHEEVIRDVKRRADELRK

SEQ ID NO: 19745 - protein, 61 aa, Artificial Sequence
  Synthetic
SEVEDLLRDLERLLEEHRERVERLIKRLRELLERHKRTVEKLNRDVKEKLRKLKKEAEDKG

SEQ ID NO: 19746 - protein, 59 aa, Artificial Sequence
  Synthetic
EEALRRLKRVVEEIKRRSDRLIEKAEEVIRDIEEKSEETLKSHREVLERVKKILTDLRK

SEQ ID NO: 19747 - protein, 61 aa, Artificial Sequence
  Synthetic
DEIDRLLEDLRRLLEEAERRVTEIIKRIKKLLEEHERRVRELNKDLRRLLEEAEDVVRRKG

SEQ ID NO: 19748 - protein, 59 aa, Artificial Sequence
  Synthetic
EKARRDLERVVTEIDRELKRLEEDIRRVLEEVKRRSEDLRRSHRRVIEDIKRRLEELRR

SEQ ID NO: 19749 - protein, 61 aa, Artificial Sequence
  Synthetic
KEVEDIIREIRKLLEDHERKVKELIDEIRRLLEEHERTVRDLNRRIKKLLEEAKEFADRKG

SEQ ID NO: 19750 - protein, 59 aa, Artificial Sequence
  Synthetic
KEMIDRVRKVVEEVKKRSRETLERIRKVIEEVKARSKELIESHEEVIKRVEETLKRLKD

SEQ ID NO: 19751 - protein, 56 aa, Artificial Sequence
  Synthetic
SLEEEIKKLLKEVRDVNDRLKETIEDLAEKIERLAKRMIERIEEILREVDRLVKEV

SEQ ID NO: 19752 - protein, 59 aa, Artificial Sequence
  Synthetic
EDVIREILKEIRKHLRDSEEENKKTLDTLRKILEDLTKAAEDILEEIRRELDRLRKEAT

SEQ ID NO: 19753 - protein, 60 aa, Artificial Sequence
  Synthetic
SELEDILRRLREEVKRLREESRKLLEDNRRLVEEVKRESDKVLKRLKDKADRLKELAERG

SEQ ID NO: 19754 - protein, 55 aa, Artificial Sequence
  Synthetic
REIKTVIDELTRELERLNREHEDLTRKLREELKKLNKRIKDLIDTLKKLLEDLKK

SEQ ID NO: 19755 - protein, 56 aa, Artificial Sequence
  Synthetic
SEEEKLRELVKEVEKRTRELNENLRRSIEEVERDTEELDKNLEKSIREVKKVLDDL

SEQ ID NO: 19756 - protein, 56 aa, Artificial Sequence
  Synthetic
AEDVLRRIRELLERNEEVNRRLDEASKRLLEENRRKNKKLDDDSKELLKRLTERAK

SEQ ID NO: 19757 - protein, 56 aa, Artificial Sequence
  Synthetic
REKERLEKVIRELETKARELNKNLKKSIDDVRRETERLNENLKRSVDELRKRLKDL

SEQ ID NO: 19758 - protein, 56 aa, Artificial Sequence
  Synthetic
AEEVLKELRKLVEELERRNRELDKRSKDLLRENRELNKDLDRKSRELMERVERKTR

SEQ ID NO: 19759 - protein, 56 aa, Artificial Sequence
  Synthetic
SEEEKLERLIEDLERKLKELNDNLKESIDRVRKRTEELNRNLRESIKRVKEELERQ

SEQ ID NO: 19760 - protein, 56 aa, Artificial Sequence
  Synthetic
AEEVLRELEKLVEDLERENRRLDKESKDLLEENKKVNKDLDDESKRLLEEVSKEAK

SEQ ID NO: 19761 - protein, 61 aa, Artificial Sequence
  Synthetic
SDKEDVTRLLEEVSRASERSRKRWKDSSDEVKRTSEESIRRLRELLERLRERIERVIREKK

SEQ ID NO: 19762 - protein, 56 aa, Artificial Sequence
  Synthetic
VDELRKKIEEIVKRDEDLVRRLLEDSKRLAEEDRRLLEEVKREIDEIRKRIDEEVK

SEQ ID NO: 19763 - protein, 61 aa, Artificial Sequence
  Synthetic
DEIDELVRRIEELAERHHRRVDEIVKRNEEVLKELDERARRLVRENEEVLKRLEETVRREG

SEQ ID NO: 19764 - protein, 59 aa, Artificial Sequence
  Synthetic
ERAEKRLRDVLEKLRRDVERNREEIKKSAEDVRREVKRVTDELKESIERVRKRVKELKD

SEQ ID NO: 19765 - protein, 59 aa, Artificial Sequence
  Synthetic
EAERKVKTVVDELRRIVDELAKELEESLKRTDETIKRLARELERVDRELEEIIKELERK

SEQ ID NO: 19766 - protein, 55 aa, Artificial Sequence
  Synthetic
DEVVRKVEEEAERIKKRIKDLVRRDEKLVEDMRRRIKRLVEKNRKVAEKMRTDTD

SEQ ID NO: 19767 - protein, 60 aa, Artificial Sequence
  Synthetic
DLEELLRKVLEELRKIVEDARRENEKSLRESEKIVREVEELNKKVLEEVEKKIREVIEEK

SEQ ID NO: 19768 - protein, 59 aa, Artificial Sequence
  Synthetic
EETIKRIVDEIRKEAERLLRRHRKSVKEDKDLAKKIREDHKKSVEDIERTLEELEKRAK

SEQ ID NO: 19769 - protein, 56 aa, Artificial Sequence
  Synthetic
SEIEELVKEIKKVADEVRRRHEKSVREIERKLEELDKKVKDLVDEDKKLADELRRR

SEQ ID NO: 19770 - protein, 59 aa, Artificial Sequence
  Synthetic
DRVRRELERVLRDVERIIRDVKRTNKRVDDDVERRIRELRKELEDSLRRSKRIVDEVRR

SEQ ID NO: 19771 - protein, 57 aa, Artificial Sequence
  Synthetic
SEIERLVEEIEKLLRKMAEEHKRSVERDERLARKLKRENEEHIKTDEELVDRLRRRN

SEQ ID NO: 19772 - protein, 59 aa, Artificial Sequence
  Synthetic
DRVLRELKRVLDEVKKIIEDVAKENEDSDRRSKKIIEDVVRENKESLDRSREEIERVRK

SEQ ID NO: 19773 - protein, 56 aa, Artificial Sequence
  Synthetic
KEIEELVKRIEDEARRLKEEHKKSVREIEELLKRLTEEVRKLVERDKKLAEDLKDR

SEQ ID NO: 19774 - protein, 59 aa, Artificial Sequence
  Synthetic
DEMLRLLEKVLRDWEEIVRRVKEANDDVNRRVEETLRDLKRKLDRSLEDSERIIREVAT

SEQ ID NO: 19775 - protein, 59 aa, Artificial Sequence
  Synthetic
SVEDELRKVIKENEDVLREVEERVETVIKRNREVIEEVAREVERVIEETRRLLKEIEKA

SEQ ID NO: 19776 - protein, 59 aa, Artificial Sequence
  Synthetic
EESIKRLLEKIRKHSEEVKETIRRLLEKIEEHTERVKREIDKMLRSNEDLMRRIKEEAE

SEQ ID NO: 19777 - protein, 59 aa, Artificial Sequence
  Synthetic
SIKEKLDEAIERNERVLRRVEEEVRKSNEKNKEVLRRVSEEVRKVIEELEDLLRKIAEK

SEQ ID NO: 19778 - protein, 59 aa, Artificial Sequence
  Synthetic
DETAERLLRKIEKHSREVDETIRRMLEEDERHIKEVEDTIREMLERLKRLIDEAEKDAK

SEQ ID NO: 19779 - protein, 60 aa, Artificial Sequence
  Synthetic
DEVREVLKKIRELIKTNREHVTRLLRTIEELSRRSEEMIRRILEEIEKLIKDVRRLTEEG

SEQ ID NO: 19780 - protein, 59 aa, Artificial Sequence
  Synthetic
EEMEKLLEEAIKEAREDSRRSDREVEEVLRKHKKVNDRVREEIERVLRKLEELLKKDRT

SEQ ID NO: 19781 - protein, 59 aa, Artificial Sequence
  Synthetic
SEVDEIVRRLEELIRRNTEKVERLLERHERLIRELKERVKELLRKHEELAKEITELTKR

SEQ ID NO: 19782 - protein, 59 aa, Artificial Sequence
  Synthetic
KEARDRIRKVLEELKKKNKELEERIRKVSKELEKVLEDVKRESEKVSKELRERLERSKT

SEQ ID NO: 19783 - protein, 59 aa, Artificial Sequence
  Synthetic
SELERLEKEARDIVENLKRVLEELAKDVKRLLKESDELLKDLREKVREILERIEELARR

SEQ ID NO: 19784 - protein, 59 aa, Artificial Sequence
  Synthetic
ETAKRELERLVKELRDVHREVEKRLKELAKELREVNKRIKDDLDRLVEALEEVLDRVRR

SEQ ID NO: 19785 - protein, 59 aa, Artificial Sequence
  Synthetic
SELEELKRRIDELLKENEEILRELEERVRRLNKENRDLLRKLEEEAKRLVEEVRRVAEE

SEQ ID NO: 19786 - protein, 58 aa, Artificial Sequence
  Synthetic
EVKERIEKVLKDLERRNRESEKEVRRLLKELKESIDDSRRRVDELVKRLRKVLEDIRR

SEQ ID NO: 19787 - protein, 61 aa, Artificial Sequence
  Synthetic
SAEETLEKLIRDLEKSIRKSAEDLERLIRELEKSVRDSAKLLRDLIREVRDVVRDVVRAKG

SEQ ID NO: 19788 - protein, 55 aa, Artificial Sequence
  Synthetic
KDVAERVKELDKRNKDLLKRLEEEVRRLIKENERLLRELAKEVKELLERIKRAAG

SEQ ID NO: 19789 - protein, 61 aa, Artificial Sequence
  Synthetic
SAEDKLRELEKKLRKSIKESADRLRKLNEELRRSVRESAERLKELIREVEEVLRDVVRKRG

SEQ ID NO: 19790 - protein, 55 aa, Artificial Sequence
  Synthetic
EEVEDEVRRLDEENKKLLEDLKRSVDELIERNKRLLEELTKRVKELLDKIRKTAE

SEQ ID NO: 19791 - protein, 61 aa, Artificial Sequence
  Synthetic
SMEDSLRELIRKLRESVKRSAEELRRLNKRVEDSIRDSARKLRELIRRVEEVVKEVVETRG

SEQ ID NO: 19792 - protein, 55 aa, Artificial Sequence
  Synthetic
ERVEDDVRRIDDENRRLLEELKKSVDELDKRNEELLRRAEKEVRDLLREIREAMR

SEQ ID NO: 19793 - protein, 60 aa, Artificial Sequence
  Synthetic
DAEEELERLLRESERVSRDSARRLRELLKKLRRSVERSRREIDRLLKELEDVIREVIKRK

SEQ ID NO: 19794 - protein, 55 aa, Artificial Sequence
  Synthetic
KDLAREVEKVVKEDEDILRRAEEEVERLIETNRDLLRKVEREVKELVEKVEEDER

SEQ ID NO: 19795 - protein, 59 aa, Artificial Sequence
  Synthetic
SELEELKREVDELTEEHKELLKRLTERVKELSERHKELLERLRERSERLVRRIRELAKR

SEQ ID NO: 19796 - protein, 59 aa, Artificial Sequence
  Synthetic
DEVLRKAEELLRRNNRVIEEIEKRLRELLKENNDVIKEIRERLEKSNKELRDVAREVAK

SEQ ID NO: 19797 - protein, 59 aa, Artificial Sequence
  Synthetic
SELEELKKKVDDSIRENERLLRELTEDVKRLSKEHKDLLKRLEDKVEELIRRARELAKR

SEQ ID NO: 19798 - protein, 59 aa, Artificial Sequence
  Synthetic
DDMLEKAKKVHDEHRKSVEESTERLKELLRRNNEVIKDIARRLDELLRKLEKVVKEIAK

SEQ ID NO: 19799 - protein, 59 aa, Artificial Sequence
  Synthetic
DELRELEEEVRKSIETNRELLERARERVERLSEEHRKLLEKVKEDSDRLVEEVKDLERR

SEQ ID NO: 19800 - protein, 59 aa, Artificial Sequence
  Synthetic
DEVLRRARTLHDEHRRSVEESERRLKELLERNNEVIKDIERKLDKSNKELKDEAEKVKK

SEQ ID NO: 19801 - protein, 59 aa, Artificial Sequence
  Synthetic
SELEEIEKKVRELTKRHRELVERVRKTVKELIETNRRLLETLTERIKRVLEEVRDLERR

SEQ ID NO: 19802 - protein, 59 aa, Artificial Sequence
  Synthetic
DKALEEAKRVLRENNEVIKDIKRRLDELLKELEKSVRESEERLRRLLEEVKRVIEEVAT

SEQ ID NO: 19803 - protein, 59 aa, Artificial Sequence
  Synthetic
SSDREVEERVKRLTDRHRELLKRVEEEVKRSIKRNKDLLDELRKESEKLVKEARDLARK

SEQ ID NO: 19804 - protein, 59 aa, Artificial Sequence
  Synthetic
EDVLRLAEKLLKDNNKVIDEIRRRLDRLHEEHKKSVDDSREELKKSNKKLEEVVREIEK

SEQ ID NO: 19805 - protein, 59 aa, Artificial Sequence
  Synthetic
DDLREVEKEIRRIAEESKKLLEEIERAVEKILRDSRRVLEELARRAKRLLEELDKLKKN

SEQ ID NO: 19806 - protein, 59 aa, Artificial Sequence
  Synthetic
EDVRREVKRLVDELREVDRKIEEDLRELVRELEKVNREIRKRIEELVRRIKEVADEVRR

SEQ ID NO: 19807 - protein, 60 aa, Artificial Sequence
  Synthetic
DMEEKMRRITEEWRRVTEEIERRHREVIKKWRDVSREIAETHRRVIDELRRVLERIAERN

SEQ ID NO: 19808 - protein, 59 aa, Artificial Sequence
  Synthetic
KDIVDKELERLREEIRTSKKESDEVVKENEELIRDSKRKSEKVVRDNKRVIKEAEEKAK

SEQ ID NO: 19809 - protein, 59 aa, Artificial Sequence
  Synthetic
DEIEELLKEIKKLVDELRKRIEELAREHKRLADELRKKIKKLKDEHDRLVRELEKLAEK

SEQ ID NO: 19810 - protein, 59 aa, Artificial Sequence
  Synthetic
KEVKDKLDKLREELKRVADKLRDDLRELHKRLKEVADRLRKLLEDANRTLREVLKETKR

SEQ ID NO: 19811 - protein, 61 aa, Artificial Sequence
  Synthetic
SAEESAKRLKEELKKSLDRSREELDKLRKDNEKVLRDVEERLRRLIEELKKVLEDIKKDKG

SEQ ID NO: 19812 - protein, 55 aa, Artificial Sequence
  Synthetic
EELEKRVEKLLRDDKRRLDELRKESEDHIREIEDTLRRIEEEVKRLLKEMRDKLK

SEQ ID NO: 19813 - protein, 59 aa, Artificial Sequence
  Synthetic
SELETIARRVEKLNEDVERLLREAKKEADRLIKENEDLLREAERKVREIIERIRRLAER

SEQ ID NO: 19814 - protein, 59 aa, Artificial Sequence
  Synthetic
KEVKEKLTRLLKSHEDVIREVSRRLKELLDRYREVSDRIRKTLEELLKELRRVVEEVRK

SEQ ID NO: 19815 - protein, 59 aa, Artificial Sequence
  Synthetic
KDLEEIERKVRKLNEDDKKLLDDLRKEVEKALRRNEESLRKSREDAKKIIKEIEDLARR

SEQ ID NO: 19816 - protein, 59 aa, Artificial Sequence
  Synthetic
KEMKDALRELLRSHRKSSEDTKRELERLLREYEKVSRDVKRDHEKLLREIREVIEEVKK

SEQ ID NO: 19817 - protein, 59 aa, Artificial Sequence
  Synthetic
SELDEIRRRVEELIETDKDILRRIAEEVRKALEDNKKSLRESEEEVRRLLEEIKKLADR

SEQ ID NO: 19818 - protein, 59 aa, Artificial Sequence
  Synthetic
EEMKKLLEDLLRKSEDSTRETRKRLKELLDRYEEVSKKIKKRHKELIEELRKVIDDVRR

SEQ ID NO: 19819 - protein, 59 aa, Artificial Sequence
  Synthetic
RVEETLTRALKEIEEVIRRVDEESKRTIRSHREVIREVDEIHTRLLERLKKVIDDIRRR

SEQ ID NO: 19820 - protein, 59 aa, Artificial Sequence
  Synthetic
DRLLKEARDEVRKIIEEIRRLLEEHERTVKKLNEDIRKRLEESERTVEELLKRLRDRAR

SEQ ID NO: 19821 - protein, 59 aa, Artificial Sequence
  Synthetic
SMEEELKRLLESHEKVIREVRKTSEDTLRSHRKVIEEAKEEHKKLLEEIKRVVERVRKR

SEQ ID NO: 19822 - protein, 59 aa, Artificial Sequence
  Synthetic
ETVLREARKEVEKLNEDIRRLLEEHKRVVDELNKELRRLLEESRRRVKELIRRIEEEAR

SEQ ID NO: 19823 - protein, 59 aa, Artificial Sequence
  Synthetic
SVEERLRELIESHRRVIEKVERDSRRTIRSHEEVIKEVKKISEDTLREIRKVIEEAKKR

SEQ ID NO: 19824 - protein, 59 aa, Artificial Sequence
  Synthetic
ETLLRDAERRVEELNEEIRRLLEKHVRDVDRLNKEIRDLAREHKERAEEIIKRIEEKAR

SEQ ID NO: 19825 - protein, 59 aa, Artificial Sequence
  Synthetic
SEMERLERRARELLRRNEELMDDLRRKAEELLKRNDRLVKEIEKKVREVLRRIEELKRR

SEQ ID NO: 19826 - protein, 59 aa, Artificial Sequence
  Synthetic
KRLEELLRRLNEEHKRISDELRKLLDEALERHRELSRRLEEELERLLREIERLVEEVTR

SEQ ID NO: 19827 - protein, 60 aa, Artificial Sequence
  Synthetic
DDMERLEEEIKEILDRLRRLLERNRRVNKEIDERSKELVKRLEEKARRLLEELRRLKDRV

SEQ ID NO: 19828 - protein, 59 aa, Artificial Sequence
  Synthetic
KELEKKAEDVLREVKKVIDEVRTDSKRLNENLRESIKDVKREAERVLREVEEAIREVER

SEQ ID NO: 19829 - protein, 60 aa, Artificial Sequence
  Synthetic
REAEELKKEVDRILEELKKLLKENEDLNRDLDRKSKELLKENREKVERLRKELRELKDKV

SEQ ID NO: 19830 - protein, 59 aa, Artificial Sequence
  Synthetic
KELEDEAKRLKDEVEKLIEEIKRKSDELNKNLRDSIRRVEETTRDLLRKIKKLIDEIKK

SEQ ID NO: 19831 - protein, 57 aa, Artificial Sequence
  Synthetic
SIEEALEDLARRIKKILDDLRREAERLLREVEELLKRVEEANRRLRRTIEEALKRLA

SEQ ID NO: 19832 - protein, 56 aa, Artificial Sequence
  Synthetic
VETAEREIRRILEEIRRLAEEARRRIEEVLKRIKKHLEESKRRNEESLERIEREAR

SEQ ID NO: 19833 - protein, 60 aa, Artificial Sequence
  Synthetic
SVEETVDELKKRIEKILREIKRVNEELAKRNEDVNEEWRREVDKMIKDIERILRDVLRKE

SEQ ID NO: 19834 - protein, 56 aa, Artificial Sequence
  Synthetic
IEKLKRDAERILEEIKRAVDTSREESERTLKELRDMVKESRKDAEEVLERIDRDKR

SEQ ID NO: 19835 - protein, 60 aa, Artificial Sequence
  Synthetic
SVKETLEDLIKKIRDLLKRVRDENKRLAEDNERLNREVEKRNRELIKRIEDELEEVRKRE

SEQ ID NO: 19836 - protein, 56 aa, Artificial Sequence
  Synthetic
IRDLKREIEKILREIKKALEDSRRKSKETLDRIREVLKTSEEDIKRILKEIREAAR

SEQ ID NO: 19837 - protein, 61 aa, Artificial Sequence
  Synthetic
SREEVVKEIEKRVEELNRRLEETVRRVIEEMKRLNKESKEVSKKIVDEVRKLLDDVRREKG

SEQ ID NO: 19838 - protein, 56 aa, Artificial Sequence
  Synthetic
EDELRRLLERIEKTVRELKREIEKILEDATRTVEDLKRKNEELLRRLKKLADDVKK

SEQ ID NO: 19839 - protein, 59 aa, Artificial Sequence
  Synthetic
RVEEILRKASKENKEVIDRDRRLAEEATELNKRVVEEDRKVMKEVTKELEDVLRRAREE

SEQ ID NO: 19840 - protein, 59 aa, Artificial Sequence
  Synthetic
DKLLRELEERSKKVLEESKKTSEDLLRESEKHVRDWREKSRKLEEKVKRLVKKVKDTTD

SEQ ID NO: 19841 - protein, 60 aa, Artificial Sequence
  Synthetic
RAEDIIRELKRRNEEVLERDRELMERAARELREVLERLKDIAREASKELKRVLDELRKRG

SEQ ID NO: 19842 - protein, 59 aa, Artificial Sequence
  Synthetic
DEVVERLARESERVLRESEETSKDLKRKVDEELRRIEDTIRRLLKRVKDLVKKIEDTSR

SEQ ID NO: 19843 - protein, 60 aa, Artificial Sequence
  Synthetic
RLREIIEKLRRDNEKVIEEDRRVAEEVRKALEKVLREDRKMADEVTKELERALKELEDRG

SEQ ID NO: 19844 - protein, 59 aa, Artificial Sequence
  Synthetic
DEVIKELEKRSKDVLDESRDESRKLLERVERLLKKIREDSERLLERVEELLREAEETAR

SEQ ID NO: 19845 - protein, 60 aa, Artificial Sequence
  Synthetic
SVEEIIRKLEEDNRDVLRRDREVAKKVEDENRKVAEEDDRIVRRVAEELKRVLKELEDKG

SEQ ID NO: 19846 - protein, 59 aa, Artificial Sequence
  Synthetic
EKVIEELKDESRKHLEELEKDSKRLEDESKKHLDDWRRTSEKLLEDVERRVREIEEESR

SEQ ID NO: 19847 - protein, 60 aa, Artificial Sequence
  Synthetic
SSEEVVRELDKEIRKSIEDLKRIVRENEEENKRSVEDVREKAKRNEERLRKVLKEADERK

SEQ ID NO: 19848 - protein, 56 aa, Artificial Sequence
  Synthetic
IRELAKRVKRIVDENKRVAEEHHRKVERIVRENEKLLKEHHDRVEELVRRIKEEVE

SEQ ID NO: 19849 - protein, 57 aa, Artificial Sequence
  Synthetic
SEEEEVRRVLEELEKKVKRLTEEHRRRLDELRKKVKDHSRKNKELLERLREEIKRIK

SEQ ID NO: 19850 - protein, 59 aa, Artificial Sequence
  Synthetic
EEAKRVLEEVEKRVRELVKTNEDVLREIEEDVRRLVKENEDSIKESKDRLRELLERLKQ

SEQ ID NO: 19851 - protein, 59 aa, Artificial Sequence
  Synthetic
DEVEEIRKILEELAREAEKVVRETRKLLEDIRKEVEELNDRNRRLLEELERRVRDIKRR

SEQ ID NO: 19852 - protein, 59 aa, Artificial Sequence
  Synthetic
DEIRRVVEDVERRLRELLDRWRKVSEEVEKRLKELIDELRESIERSADRLRKLIEELKR

SEQ ID NO: 19853 - protein, 59 aa, Artificial Sequence
  Synthetic
REVEEIKKTLEDIRREAKELLDRTRELLDRLRKSVEELNRDNERLLREAKDEVEKVKRD

SEQ ID NO: 19854 - protein, 59 aa, Artificial Sequence
  Synthetic
EEIKKVVERVEREIEDLIRRWEEVSRDVEEKLKDLNKKVEESIRRSAKDLRELLREVEE

SEQ ID NO: 19855 - protein, 61 aa, Artificial Sequence
  Synthetic
SRAEKVLKRVTDLIRELLRTVTELVRRNREVIEELLRRVAKLHRDNRELNKKVLEDVRRDG

SEQ ID NO: 19856 - protein, 55 aa, Artificial Sequence
  Synthetic
EVVDELRRRIREVEKTLDRLLEESEERARRVLKELDRLLEESRKSSREVIEEAKR

SEQ ID NO: 19857 - protein, 56 aa, Artificial Sequence
  Synthetic
SVEELLKKLEKENRDVIREMKKLLDELEEENRRVIEEWRRITKELEDRNRRVREEI

SEQ ID NO: 19858 - protein, 59 aa, Artificial Sequence
  Synthetic
EEIIRRLVKHNKELVDEIRKTIERLREHNRKLVEKVREDVKRSTKHNRDLVKEVRDRAK

SEQ ID NO: 19859 - protein, 56 aa, Artificial Sequence
  Synthetic
SLEELLDRLRKLNETVIRDMERVLKELEERNRKVIKEDRDVLEELARRNEKVKRDI

SEQ ID NO: 19860 - protein, 59 aa, Artificial Sequence
  Synthetic
EEIAKELVKHNEKKVREIKKTIDDLRKHNEELVKEIRETSERLREHNERLLREALRRAK

SEQ ID NO: 19861 - protein, 60 aa, Artificial Sequence
  Synthetic
DLEEVVKDLERKLRDVARKDRKLVEDSRKILKDVVDKDRELVERSRRILEEVLERIRRRG

SEQ ID NO: 19862 - protein, 59 aa, Artificial Sequence
  Synthetic
RDTARKLLEDVADELRRWLEDSERLHKENKDTIEKWLRRSRKLHEENRKLIEDLLRTVT

SEQ ID NO: 19863 - protein, 59 aa, Artificial Sequence
  Synthetic
SLEDVLRELKERLERSHRKLRELVRRLEEDLKRVLRELEKIVDEVRKINEDVRREVERR

SEQ ID NO: 19864 - protein, 59 aa, Artificial Sequence
  Synthetic
EDIVRKLLEDVRKLVEELDRRAKELEERVKKVVDELLEKARRLLEKNRRTVEKILRDVK

SEQ ID NO: 19865 - protein, 60 aa, Artificial Sequence
  Synthetic
SEVEKLLREVEDRDRRILKKVKELLDEVRRLIEDHLRRSEDALRRVRKRIEELKELVERG

SEQ ID NO: 19866 - protein, 59 aa, Artificial Sequence
  Synthetic
ERLEEMLRRLKKSIEDSVREVRKVLKEAKDIARKVIEDTKRLLEELKRIMKKVLDELRK

SEQ ID NO: 19867 - protein, 60 aa, Artificial Sequence
  Synthetic
SEIEELVERVKARDEKHLRDSEKLLEEVKRRDRKLEEDSKKLLKDVKDLLRELEEVAKRG

SEQ ID NO: 19868 - protein, 59 aa, Artificial Sequence
  Synthetic
ERLRKLLDDLRKSIEESRKRSEEILREAEDTMRKSVETNERLLEELERELRRVVEELRR

SEQ ID NO: 19869 - protein, 60 aa, Artificial Sequence
  Synthetic
DEIERVLEEVERIDRELLKRSEDLLREVRERDKELEERSKRLLEKARRLIETLRDMARKG

SEQ ID NO: 19870 - protein, 59 aa, Artificial Sequence
  Synthetic
ERVKTIIDEARKSIDDSVRENKKVLDELKETIERSKKKNEDILREIEKILEEVREELRK

SEQ ID NO: 19871 - protein, 60 aa, Artificial Sequence
  Synthetic
KDVDELLERVKRRDEELERKVEKLLKRVRDLIREHDEKVKELEDEVRDRIKKLLEMAERG

SEQ ID NO: 19872 - protein, 59 aa, Artificial Sequence
  Synthetic
EELERVLRELKRSIETSTRRLRKILEELRRILEESERKVEEVLKELERIAREVEERLRT

SEQ ID NO: 19873 - protein, 60 aa, Artificial Sequence
  Synthetic
SDIEDVVRKVEEEVRDHNRRVEELLKRVERRDRRLEETVEELLKEIEDKLRRLKEMAERG

SEQ ID NO: 19874 - protein, 59 aa, Artificial Sequence
  Synthetic
ERLEKLLRELEETLRRSKERVKEVLEDLKRTITESKRRLKKILDEIRKRLEEVERDLKR

SEQ ID NO: 19875 - protein, 60 aa, Artificial Sequence
  Synthetic
SLEEVVDKLRRDSEESLKKNETVLRRVTKELTELLKRWREASERLKEELREVLERVRKKG

SEQ ID NO: 19876 - protein, 59 aa, Artificial Sequence
  Synthetic
EDTLRKLAEEVKRVVRDDEEKVKRLEEEVKEEVKKLEDDLRRSEERVERTIREIEKRAK

SEQ ID NO: 19877 - protein, 60 aa, Artificial Sequence
  Synthetic
SVEDLVREVERRLKTVLDEDEEVLKRVEDESRESIKENEEVLREVSERLDKVLKDVRRRG

SEQ ID NO: 19878 - protein, 59 aa, Artificial Sequence
  Synthetic
EEDLKRLEDRVEEEVRRAKRESDELLKRVRRTVEDDKRRLRELREEVKDLLERIREAEK

SEQ ID NO: 19879 - protein, 60 aa, Artificial Sequence
  Synthetic
SEVDEVRKRSEKVVEENERRIEESERRIAKLVKEVRDVIEDAKRRVEEILRRLEEEMRKG

SEQ ID NO: 19880 - protein, 56 aa, Artificial Sequence
  Synthetic
KDVLEEMRKTHERVIKEWERAHKEVNEKLEKIIRELEKVLEEVEDEAREVIRRLET

SEQ ID NO: 19881 - protein, 59 aa, Artificial Sequence
  Synthetic
SASEDLERVLRELAKEVEKLLRESEKLLKELEDLARELLERDRKLLKELEEKVKRLKER

SEQ ID NO: 19882 - protein, 56 aa, Artificial Sequence
  Synthetic
ERVLDDVRKRIEDLVRELKKVNEDIEKKVRELIERLRRSLEKSKEDIRRLVEELRR

SEQ ID NO: 19883 - protein, 60 aa, Artificial Sequence
  Synthetic
DMSEELEEILRRLEEESRRHLRTDEELLRELEEKIRRLLREIEEILERLKKRIDEVKTRN

SEQ ID NO: 19884 - protein, 56 aa, Artificial Sequence
  Synthetic
ERVLKRVKDRIDELIRRNEESLERTRDEIRKLIEELKKVLDRVKEEIEKLVEALKK

SEQ ID NO: 19885 - protein, 59 aa, Artificial Sequence
  Synthetic
EMTERLERVLEELKRKSDEHIKTDEELLRRLEKKSRDHLRELEEILRRLEREAREVKRN

SEQ ID NO: 19886 - protein, 56 aa, Artificial Sequence
  Synthetic
REALKKVEDAIDKLRRDNERSLERTKREIERLIRENKDVLDKIEKRIRELIEELER

SEQ ID NO: 19887 - protein, 59 aa, Artificial Sequence
  Synthetic
SADEKLDKILREMKKRSDDHIREVEKILRDLDREVKEILKKDEKLLRDLDRRVKDVKRR

SEQ ID NO: 19888 - protein, 56 aa, Artificial Sequence
  Synthetic
DEVLKRVEETVRRLVEENKKVLDRVREEIRKLIEELRDSLRRSEKRIRELADELRR

SEQ ID NO: 19889 - protein, 59 aa, Artificial Sequence
  Synthetic
DLEDILREIARLIERLIDENRKVLEEIARRLKELIEELKKSLKRSEELLRRLEKELKDS

SEQ ID NO: 19890 - protein, 59 aa, Artificial Sequence
  Synthetic
KDLLRTLEKVAEDLKRRSERHIRELRRTLEDLERDVRRLLREDEEKLKRAAEEVKEAIK

SEQ ID NO: 19891 - protein, 59 aa, Artificial Sequence
  Synthetic
DLEDVLRDIERLLRDLIRRNKEVLDRIRELIKKLIDENRKSLKRSKEELERLIRELAKS

SEQ ID NO: 19892 - protein, 59 aa, Artificial Sequence
  Synthetic
EELLRRLREVLERLKRESEKHLEELKKILEDLERESRRHIEEDKRLLKELKEEVDERIR

SEQ ID NO: 19893 - protein, 59 aa, Artificial Sequence
  Synthetic
SLEEVLKRIEDELRRLIEENKESLERSERLIRELKKRLEEVLRRIKKLLEELIRRLEES

SEQ ID NO: 19894 - protein, 59 aa, Artificial Sequence
  Synthetic
KKLLEDLKRTLDELRRESEEHIRRDERLAEELAREVEKLLKDMERILRELAKEVEDRIK

SEQ ID NO: 19895 - protein, 55 aa, Artificial Sequence
  Synthetic
DASRRVEEKLKEVEERVRKLLEEDRKRLKDSKRKVEELIERDKTELKKVKDRADG

SEQ ID NO: 19896 - protein, 56 aa, Artificial Sequence
  Synthetic
KKVIDTVRKRLKELLDELKKSVEDTHRENRRVLKELEESHKRTNERLDDLLRELER

SEQ ID NO: 19897 - protein, 59 aa, Artificial Sequence
  Synthetic
SLEDVVRRVREELERLLRTHEEVIRRVEEELRRLLEEYRKVSKEIEEDLRRLLKEVRDR

SEQ ID NO: 19898 - protein, 60 aa, Artificial Sequence
  Synthetic
VEDLLREIKKELEDVKRKVDKLNEEVERILKKAKDEVKEAIKENRDRLRRLRDEVRRLKK

SEQ ID NO: 19899 - protein, 59 aa, Artificial Sequence
  Synthetic
GLEDVVRRVEKRLEDLLRRYKKVSERLEREHRRVLDEYRKVSEEIDKILRDLLKEVRDS

SEQ ID NO: 19900 - protein, 60 aa, Artificial Sequence
  Synthetic
VEELLKEIEKLLKDIERTVEKALKENKDSIRRSKEKVDRMIKRNRELAKELEDKVRELKR

SEQ ID NO: 19901 - protein, 60 aa, Artificial Sequence
  Synthetic
SIEDILRELADTIRRLTEESEKILRKAEELLRRLTEEWRKSLKDLEDLIRKLIEEIRRRG

SEQ ID NO: 19902 - protein, 55 aa, Artificial Sequence
  Synthetic
EEIKKLMDEIRKKVEKHLREVEKVLREVEEEVKRELRKSEELARRIEEKIRREKK

SEQ ID NO: 19903 - protein, 61 aa, Artificial Sequence
  Synthetic
SEVEEALRRMEETIRRVREKLKKSLEDMRREIERIRRELEKSLEEFERDIERITRDIRRRG

SEQ ID NO: 19904 - protein, 56 aa, Artificial Sequence
  Synthetic
DDALRKIEELVKRLDRELREVNKEIEKVVRELKEELKRVDDEIERLVRELRKEAER

SEQ ID NO: 19905 - protein, 59 aa, Artificial Sequence
  Synthetic
DEIDEIRKVAERLEKEARELVKENEDDLKRHKERVDEIVKKIEEKVRRLEETARKLKEE

SEQ ID NO: 19906 - protein, 59 aa, Artificial Sequence
  Synthetic
EELKKVLEDLRRVLEKVHKLNREVLDKHREIVKRLSDKIKTVLRKLEEILKRAEEELRR

SEQ ID NO: 19907 - protein, 56 aa, Artificial Sequence
  Synthetic
SIEELLEEVERVVREVERRLDELLERNRRVIEEVRRRDDKLTKENEDVIRDVRRAG

SEQ ID NO: 19908 - protein, 60 aa, Artificial Sequence
  Synthetic
EEDLIREVEKRLEDIKDLLRRMKEEVERHSREVEDRLRRSEERWRDHSKKVKERLDRATT

SEQ ID NO: 19909 - protein, 59 aa, Artificial Sequence
  Synthetic
SLEEEVRRLLEEIKRLADENRDYVRRSLETNKKTNKDNRDEIRKALERIKRLAREIERI

SEQ ID NO: 19910 - protein, 56 aa, Artificial Sequence
  Synthetic
EKLLREVEELLRRVEEEHERLHRENRKLNDKDRETLERLIREVDDLLRKLEEEARR

SEQ ID NO: 19911 - protein, 57 aa, Artificial Sequence
  Synthetic
RVDELLEEVRKLVKDVHDTTEELLKEVERRLDEVKKRVDRSNEEVKELVKEAVKRSG

SEQ ID NO: 19912 - protein, 56 aa, Artificial Sequence
  Synthetic
DTKIEELLRRIEKYMRESKERIDRLLERIDEVLEKNERDVRKLLEDIRRMIEKDDT

SEQ ID NO: 19913 - protein, 59 aa, Artificial Sequence
  Synthetic
DTIERLLEDIKRILDKNRRDARRVLEEIKRSNEKNREDIKRIEEEIDRLLKEIKKKAEE

SEQ ID NO: 19914 - protein, 59 aa, Artificial Sequence
  Synthetic
KDVVKEVEELLKRVEETHRKLNKEVEELLERDERDLRRLIDDVRRLLEEVRKTLEDLRR

SEQ ID NO: 19915 - protein, 59 aa, Artificial Sequence
  Synthetic
RELEEARERIKELLEEIKDEVRRWREKIKRLLEDSRRKAERLKEDIKRLLEEIKKLSDD

SEQ ID NO: 19916 - protein, 59 aa, Artificial Sequence
  Synthetic
EDALRDIERLLREVDDAFRRLVEELRRLNEEVHRTTDELIREVEDMLRKVEEALKREKD

SEQ ID NO: 19917 - protein, 57 aa, Artificial Sequence
  Synthetic
EEIERVLEEIKRTADEIRKEIERVLEKSKKLLDDHHEEVKRMLERIRDKAKKVTDRG

SEQ ID NO: 19918 - protein, 58 aa, Artificial Sequence
  Synthetic
KVVEELRKILERLKDLVRDLERKLDELNKRVRDRVEENRKELEKLLREARDRIRELER

SEQ ID NO: 19919 - protein, 60 aa, Artificial Sequence
  Synthetic
SLEDRLREVLKRYEDRSRDLERELKRVLDEYDDSSRKVAEELKKVLDEIRETVERIKKDV

SEQ ID NO: 19920 - protein, 59 aa, Artificial Sequence
  Synthetic
EKEVADLVKKLEDDLRRTSDKVRRVVEEIKRRLEELERRYKALVKKLRDKLREIKEEVR

SEQ ID NO: 19921 - protein, 61 aa, Artificial Sequence
  Synthetic
DVEEELKKVDDKVEELVRKVIEDIRRALERVRELVERVRRKLEETNKKLKKLVEDIVRKKG

SEQ ID NO: 19922 - protein, 58 aa, Artificial Sequence
  Synthetic
EKVEELLRKSEELAKRIEDDVRRVLRKLEDTVRRIKEEIDRLLKDNERIIEEVKRRAD

SEQ ID NO: 19923 - protein, 61 aa, Artificial Sequence
  Synthetic
SVEEIIEDMLRKVRELVRRVRELLREVDEKLKKLVEDVRRRLEKTNKELKDLVEDIVRRSG

SEQ ID NO: 19924 - protein, 58 aa, Artificial Sequence
  Synthetic
EEAKRVLDKLRKTAEDIKRTIDELLKRSEETIKKIEDKIDKLVKKNKELVKRIEDEAR

SEQ ID NO: 19925 - protein, 60 aa, Artificial Sequence
  Synthetic
SLRELLDEVRRAVEESNRELERLLEEVDRSNRESHRELKRLLEKIKKLAEEVERELERKG

SEQ ID NO: 19926 - protein, 60 aa, Artificial Sequence
  Synthetic
EEEVKKAVEDLKRLVDTHKKRVEEVIDELRKHSEKHSEEVRRVITELARRLEELLDEIRR

SEQ ID NO: 19927 - protein, 59 aa, Artificial Sequence
  Synthetic
SAEEKVEDELRKHHEEVKRLLEEIEKTMRDHHREVEETLKDSRRELKRIEEEARKVKER

SEQ ID NO: 19928 - protein, 56 aa, Artificial Sequence
  Synthetic
EDILRKLEEEVRRNDKELRDLLEELKDLVRRNDEELRKLNEEVRKRVEELIEELRR

SEQ ID NO: 19929 - protein, 57 aa, Artificial Sequence
  Synthetic
SIEEMLKRVKEESKRSNDKIRDVLRKVEETSRRSKERIDKLLRDVERTVEEVIRDVK

SEQ ID NO: 19930 - protein, 60 aa, Artificial Sequence
  Synthetic
EKDVLDRLRRYVEENRRRVEKLIRDLEDAVRRNEDDARRVAKEIEDVVREIKDRVDKTRT

SEQ ID NO: 19931 - protein, 57 aa, Artificial Sequence
  Synthetic
SEVDKKLEDIRRRLEKLERETEESLDRVRKELEDLEKESRESLKRLREDLERVKKTK

SEQ ID NO: 19932 - protein, 59 aa, Artificial Sequence
  Synthetic
KKKADELRRVIEEIIRRLRELDEKHRRLVEEIIRRLEELNREHSKVVEEIARELKKTAK

SEQ ID NO: 19933 - protein, 56 aa, Artificial Sequence
  Synthetic
SLLEELKRSIEESIRTLKELLDRLEELIRRIAEEIRRLLEEHSRKTEEVIRRAEKA

SEQ ID NO: 19934 - protein, 59 aa, Artificial Sequence
  Synthetic
EKVIEELKRKLEEENKRLKKVVEEIAKTLKDLLDEVRRRIEDSLRKLEELLERVERKTR

SEQ ID NO: 19935 - protein, 57 aa, Artificial Sequence
  Synthetic
SLLEKLEKLIRDIKRTVDKLLEDNEETIRRIIRDIERLLKRHSDETREVVRTLKERG

SEQ ID NO: 19936 - protein, 59 aa, Artificial Sequence
  Synthetic
KDVIERIERELRELLKKLKEDADRHNEDAERKLRRLRDTIRRSLKKLEEDLRRLSKEAE

SEQ ID NO: 19937 - protein, 60 aa, Artificial Sequence
  Synthetic
SRVEETLKRLEDELKRIEEEVRKLLDELRRHLEENRRRTEKLLRELREELERVRERVEKG

SEQ ID NO: 19938 - protein, 59 aa, Artificial Sequence
  Synthetic
EKLLRRLERLVREIKRRLEELLKRLADLVRELKKEHERLNRELEELVRRIKERLKEAEK

SEQ ID NO: 19939 - protein, 56 aa, Artificial Sequence
  Synthetic
EEEERIKERLDRSVEELKKSADKMREEIERSEKKLKESADRVRKEIEDALRRIREE

SEQ ID NO: 19940 - protein, 59 aa, Artificial Sequence
  Synthetic
EDVVRRVEELLRRHEEVTKTINREIEELIKTHERSTRELNKEIKELIERLEETIKERTR

SEQ ID NO: 19941 - protein, 56 aa, Artificial Sequence
  Synthetic
KDAEELERRLRKSAEDLKRSAEEMKKRLDKSREDVKRKVEEAKKIVEDLEEDLKKR

SEQ ID NO: 19942 - protein, 59 aa, Artificial Sequence
  Synthetic
EEMVKRLRELLRTHEEITERINRKIEKLLREHEEETKRLLDDLRRLLEELRKKIEEEKR

SEQ ID NO: 19943 - protein, 56 aa, Artificial Sequence
  Synthetic
DEEERIEEELRKSTEKLKESLDRMRRDIEKSAEDLRKSVEDVERDMRRLLEDIEKR

SEQ ID NO: 19944 - protein, 59 aa, Artificial Sequence
  Synthetic
KDALERVRRLLERHERETRRINEEIERLIRRHVEETKRVNKRIKRLLDELKRRIEEKSK

SEQ ID NO: 19945 - protein, 56 aa, Artificial Sequence
  Synthetic
SEEEEIKKRIDDARKELEESTREVRERLRDSMRRLDESLKRVEEEIRKLADDIRRR

SEQ ID NO: 19946 - protein, 59 aa, Artificial Sequence
  Synthetic
EEVVRRVRELLKRLKEEVDRINDEIRKLLEDHKKRTEEVNETIKRLIDRLEEELRRRRE

SEQ ID NO: 19947 - protein, 60 aa, Artificial Sequence
  Synthetic
SEVEKIIEKIRREEDRNRREVEEKLKRIREHVRRNEEDTRRIIRELRELLKEALDRLRRG

SEQ ID NO: 19948 - protein, 59 aa, Artificial Sequence
  Synthetic
EKLLRELEELIRRVKKRHDELLKEVADLVKEVEDRHRKLNEELERVAREIEETLKRELD

SEQ ID NO: 19949 - protein, 57 aa, Artificial Sequence
  Synthetic
SEVETLLDKIRRDNEDLNRRVREELERIRKADEDVNREIEKVLRDIEEAIRKLKRDR

SEQ ID NO: 19950 - protein, 59 aa, Artificial Sequence
  Synthetic
DELVRRLEKILREHEENIKRIVEELERLLEEHKKNLEDLKRRLRDILRKVEEELDRTRK

SEQ ID NO: 19951 - protein, 57 aa, Artificial Sequence
  Synthetic
SETEELVKKIDKRDKEVKERAKRVVDEIKERDKRVNEEIEKVLRDIERTIKKVREDR

SEQ ID NO: 19952 - protein, 59 aa, Artificial Sequence
  Synthetic
KEMVDRLRELLERHEKTIRDLVRTLEELLERHRKNIEDLVRELRELLDRAREELKRTAD

SEQ ID NO: 19953 - protein, 57 aa, Artificial Sequence
  Synthetic
SDIEEALKKIKKMTRELREEIKKTEEESERRAKELEKEVRDYLRKVEEEAKRLKDTK

SEQ ID NO: 19954 - protein, 62 aa, Artificial Sequence
  Synthetic
EDIRRVLEELKKVLEENNRVIEELARRLDELNKKLRELLERIKKTLDDLNKRLEKLIRDTEK

SEQ ID NO: 19955 - protein, 57 aa, Artificial Sequence
  Synthetic
SKIEKMLRDIEKKTKELEDEIREALKRLREIAEKLKDEVEKYIRELRELLKRLAETK

SEQ ID NO: 19956 - protein, 62 aa, Artificial Sequence
  Synthetic
EKIREALERLRKILRENNEVIRELVERLRKVLEDLKRTVKTIEDRLRKVNEDLKRLIEELER

SEQ ID NO: 19957 - protein, 57 aa, Artificial Sequence
  Synthetic
SEAEKLIEDIKKLIEDHKKRTKELIDEIEEDIKKHREDVERLLRDIERLIEELEREN

SEQ ID NO: 19958 - protein, 59 aa, Artificial Sequence
  Synthetic
EEVERKVREAVKDVRRVLDESRRRLDTAIRKVEEDLRKSREDLERAVKKLRDVLEELKR

SEQ ID NO: 19959 - protein, 60 aa, Artificial Sequence
  Synthetic
SEVEKLERKTEKILKDLKDEVKRAEEETRRILEELKKMLEDMEKRTREILKRIRDLARDG

SEQ ID NO: 19960 - protein, 56 aa, Artificial Sequence
  Synthetic
EKKLRELNTELTRLIDEIRKRLEELNERLRKLVEEIEERLRRLNEELKRLVEEIRR

SEQ ID NO: 19961 - protein, 57 aa, Artificial Sequence
  Synthetic
KELEDTAEESKRELEKIRDEVRKEEEESEKLLRKIEKELREYAEKTRRILEKLRRDQ

SEQ ID NO: 19962 - protein, 59 aa, Artificial Sequence
  Synthetic
EEVARLLKKLNDELRRLIREIEERLRKLNDDLRELIERVEERLRRLNEELEKVIRELET

SEQ ID NO: 19963 - protein, 57 aa, Artificial Sequence
  Synthetic
DEVEDTERRSKKKLEELEEELRRTATESKRTLEELKRRLEDEERRSRDALRRLKEAN

SEQ ID NO: 19964 - protein, 59 aa, Artificial Sequence
  Synthetic
EEVKRRLERLNEEIEKLIRDIERTNRELNKELEDLIKEIEDRNRKLNEDLRRLIDELRK

SEQ ID NO: 19965 - protein, 61 aa, Artificial Sequence
  Synthetic
SELEEIAREVKETSKRHEEHVRRSEEEVKKTLKRLKEHVDKSSEDAERTLEELERRLRRDG

SEQ ID NO: 19966 - protein, 55 aa, Artificial Sequence
  Synthetic
DELRRLKEELKENIERAEESHKELADRLRELIKRIKERHEELLRRLRKLLEEIRK

SEQ ID NO: 19967 - protein, 60 aa, Artificial Sequence
  Synthetic
SAEEDLERLIRALKKVLDDHERLLRELLRRLEEVVRRHKELLKKLNRDLEEVLKDIKEKK

SEQ ID NO: 19968 - protein, 55 aa, Artificial Sequence
  Synthetic
DETDKEVRDTIRRIRKHSREVAEEVRKIIEELRRHSKKMADDSKRTIDELRERAK

SEQ ID NO: 19969 - protein, 60 aa, Artificial Sequence
  Synthetic
KVEEELDRLLKEIEKIIEEHRKKNKKLNDDIRRLIEEHERDLRELLKELEKLIRDLKKDL

SEQ ID NO: 19970 - protein, 59 aa, Artificial Sequence
  Synthetic
DRAVEEVRKRIEEILKRIRDNSKRVEEETRELLERIRRNSERLRRDVERLARELEEKKR

SEQ ID NO: 19971 - protein, 57 aa, Artificial Sequence
  Synthetic
SDEERLEEKLRRVEREVEKKLKRLKEELEEYARRVKEMSDRHREEVERFEEEVRRRG

SEQ ID NO: 19972 - protein, 59 aa, Artificial Sequence
  Synthetic
DTLRKLMEKIKRALEELLKRLEDLVRRIEEELRRLNEELRKNIREAEERLRKLKEDAER

SEQ ID NO: 19973 - protein, 60 aa, Artificial Sequence
  Synthetic
SADEILKEIEDTIRKLIEDNKRTLEEHERRTRKLIRELRELLKRHKTESRRLAEELKKDG

SEQ ID NO: 19974 - protein, 56 aa, Artificial Sequence
  Synthetic
GEEVRKRLEELKKKVERENRRHREHLKKVAKEVKRTLDEIRRHLEEVKERVKRARD

SEQ ID NO: 19975 - protein, 56 aa, Artificial Sequence
  Synthetic
SEEEELKRRVDEVRKRTKEIIEELKRHVDRNERTVREIIKRLEEEVRRVAEKVKRG

SEQ ID NO: 19976 - protein, 56 aa, Artificial Sequence
  Synthetic
SKVVEDVRRTLKRLNDELRKVVKDARELHERLLRDLKRVIDRIRERLKRLLDEAEK

SEQ ID NO: 19977 - protein, 57 aa, Artificial Sequence
  Synthetic
DEVETLAREVKKSNDDDRRKTKKTADDVEKKLEDLKRRDEEVRERVEEDLKRLREKV

SEQ ID NO: 19978 - protein, 59 aa, Artificial Sequence
  Synthetic
KEVLDRVADEIRRLNKETNDVDRDVRRRIDKLVEDVKRVTEEVSKEIKRLAEEVDRRIT

SEQ ID NO: 19979 - protein, 57 aa, Artificial Sequence
  Synthetic
DEVEELKRKVRESNKRDEDETRRTEERVEREVRRLEEEVKDVKRKVERELERIAREI

SEQ ID NO: 19980 - protein, 59 aa, Artificial Sequence
  Synthetic
REVVKEVEDRIRKLNRETNEVDKEVRKRVDDLIRDLERVLREVKEEVDRLVRKVEEDAK

SEQ ID NO: 19981 - protein, 61 aa, Artificial Sequence
  Synthetic
DEVEELVKRAEDILERLKREVDRLIKESEDLNRRIRKHVEDTIKEVRKRLEELRKEVEDRA

SEQ ID NO: 19982 - protein, 60 aa, Artificial Sequence
  Synthetic
AKDLLKEVVERVTRVAKAVKEKLDEVVRESREVIKRVEEKNRRVLEEVERVARELKKAID

SEQ ID NO: 19983 - protein, 61 aa, Artificial Sequence
  Synthetic
DEVEELVRRAEEELKRLRKHVEETVERSKKLNDEIKKHVDRTVKEAKDELRRLREEVKKRG

SEQ ID NO: 19984 - protein, 62 aa, Artificial Sequence
  Synthetic
EEAKKLLEDVARRVRKVAEELKKKNKELLETSDRVIEKVRKKNEDLKRTVDEVARRLEEAIK

SEQ ID NO: 19985 - protein, 60 aa, Artificial Sequence
  Synthetic
SEVDEVVERLRRISEELDRRVKKLVKDARRISKELEEAVRRVVKTAKDANKELRKEVRER

SEQ ID NO: 19986 - protein, 56 aa, Artificial Sequence
  Synthetic
VDTLAEDAKRSARETEEILRRLVKKLEESARDTKRIIDELDKELKDSNEEVRRRLK

SEQ ID NO: 19987 - protein, 57 aa, Artificial Sequence
  Synthetic
DEAEEVVKDVEREVRRLEKENRDLVERSKRLVERLEKESRDLVRKSREDVKRLREKG

SEQ ID NO: 19988 - protein, 56 aa, Artificial Sequence
  Synthetic
EEELRKDVERVVKKDEDITDEVRKENDEVVKKNEDIIDELRKKNEEVLRRVDEEAR

SEQ ID NO: 19989 - protein, 56 aa, Artificial Sequence
  Synthetic
SEVEDVVRKVRELVKRLRDESRRLVEESRRLVEELEKRSRDLVKTAEDIVRELKEA

SEQ ID NO: 19990 - protein, 56 aa, Artificial Sequence
  Synthetic
KDELDKEVKEAVKKNREIIRRLEKRNRDVVEENRKIIEDIEKKVRDVVREVRREAK

SEQ ID NO: 19991 - protein, 60 aa, Artificial Sequence
  Synthetic
SSLEEVAERVKKLVRELEESTKTVEELVRRLVTELRKSTEKVRRDVDKLVKELEEIIRDV

SEQ ID NO: 19992 - protein, 58 aa, Artificial Sequence
  Synthetic
REVKRLVEEVEKLIERLRRESRRLIERVRREARELKEESRRLEEEVRKKIEELARRVK

SEQ ID NO: 19993 - protein, 60 aa, Artificial Sequence
  Synthetic
RDLEEVKKKVDKLVRELEESSKKVRKDVEDLVKELEDTTRDVKRLVEELVTRLKRIIEKV

SEQ ID NO: 19994 - protein, 58 aa, Artificial Sequence
  Synthetic
REVKKIIEDVEREMERLERDSRRIVKEVREEADRLRKESKRLEEDVKRKLKELRERVN

SEQ ID NO: 19995 - protein, 60 aa, Artificial Sequence
  Synthetic
DELERVKEKVDKLVAELEKSTDDVKKKVEDLVRELERSSEKVKKDVDRLVKELEDIIRRV

SEQ ID NO: 19996 - protein, 58 aa, Artificial Sequence
  Synthetic
REVKKVVEDVRREAKRLKERSKKLEDEVRDLLRELEKRSDEITKRVREEMKRLEDEVK

SEQ ID NO: 19997 - protein, 60 aa, Artificial Sequence
  Synthetic
DELEDVKRRVEKLVRELEESSKEVRKRVEDLVRELERTTEEVEKLVRDLVRRLEDIIRRV

SEQ ID NO: 19998 - protein, 58 aa, Artificial Sequence
  Synthetic
EDIKRLEEDVERKLRRLEEESRRIVEEVKKEAERLKERSERLTKEVRELADRLAREVD

SEQ ID NO: 19999 - protein, 60 aa, Artificial Sequence
  Synthetic
RELEEVKRRVERLVRELEESLRRVRKEVEDLVRDLERVSKEVEDTVRELVRRLDEVIRRV

SEQ ID NO: 20000 - protein, 58 aa, Artificial Sequence
  Synthetic
REVKTLVEEVRRLLEELERRSRKLVKEVRDEAERLKREDEEIIREVRELLKELERKVR

SEQ ID NO: 20001 - protein, 55 aa, Artificial Sequence
  Synthetic
DELEEVKRTVEELLERLERVNKDVKRKVKELLDRLREVDDRVKKEVKRLIEEVKN

SEQ ID NO: 20002 - protein, 58 aa, Artificial Sequence
  Synthetic
EEIKKLADRVRRELKRSEDHTKRLAEEVRKDLEESRKHTKELEKEVEEELRRLKKEVR

SEQ ID NO: 20003 - protein, 55 aa, Artificial Sequence
  Synthetic
SELEEAAKAVEKLAREAEKSSEDARRAVERLAREAKRANDEAEKAVRELAERARR

SEQ ID NO: 20004 - protein, 58 aa, Artificial Sequence
  Synthetic
KEAKKLAKEAREIADRLRRESEEIAREAEKIAKELADHTRELAERARRIADKLKKDVK

SEQ ID NO: 20005 - protein, 60 aa, Artificial Sequence
  Synthetic
SAEDLIREVRRRVKELERKLEEILKRSEDLTRRLREEAERILKESRDRVRKLEEDARREA

SEQ ID NO: 20006 - protein, 55 aa, Artificial Sequence
  Synthetic
KEVIKKIRDILRRLSEELEKVLEDSERILRRLEDELRESLKRTEEILRELRRELK

SEQ ID NO: 20007 - protein, 56 aa, Artificial Sequence
  Synthetic
SVDEVLKEIEDALRRLKEEVERVLKENEDELRRLEEEVRRVLKEDEELLEELKRKV

SEQ ID NO: 20008 - protein, 59 aa, Artificial Sequence
  Synthetic
EKKIRDVAKEIRDRLKELEEEIEEVTRRNKKLLDDVEEEIRRVHEKTRRLLETVLRRAT

SEQ ID NO: 20009 - protein, 56 aa, Artificial Sequence
  Synthetic
RLEEVVEEMERLIRDLEKKVEDARERNERLVRESRKKAEELIKELRKLLRELEEEI

SEQ ID NO: 20010 - protein, 56 aa, Artificial Sequence
  Synthetic
VETVLKRVREVIRRVEETIKRLDDRNKESSEDVERRLRELLREVREIIKRVREKTR

SEQ ID NO: 20011 - protein, 56 aa, Artificial Sequence
  Synthetic
RLEDVVRESKKLVEESERRVREAIRRNEELVKDSEREAREVIEELKELLRRLEEEL

SEQ ID NO: 20012 - protein, 56 aa, Artificial Sequence
  Synthetic
VEDLLREVRRVDKEANEKIEELDRRNKKSSDDVKKKIRDLKREVKKVIDEVRERTR

SEQ ID NO: 20013 - protein, 57 aa, Artificial Sequence
  Synthetic
SELEKVLTESRDVVRRATKRLREVHKKTKEVVDRLREKLKRVEDEVRKAVRELEEKV

SEQ ID NO: 20014 - protein, 59 aa, Artificial Sequence
  Synthetic
KRLEDVLKESKKLTDDLRKDAKRVLDEDRRLVEELKKELDEARKRVEDLVREVKDRARR

SEQ ID NO: 20015 - protein, 60 aa, Artificial Sequence
  Synthetic
DEVEEVRKRVEEVIRRNEERIEDVRKKVEDVIRRNEKLVDDVRREVKEVLDKLRELLERR

SEQ ID NO: 20016 - protein, 60 aa, Artificial Sequence
  Synthetic
KETVDEVAERLKKLLEESERRVKRVLDEARKLVKRSEDRSKKVLDELEELLRRVRKEADK

SEQ ID NO: 20017 - protein, 61 aa, Artificial Sequence
  Synthetic
RELEELLEEARRSSEEVKKILKKLKKEVDESSERLERIIEKLLRDAKRVADEVRDILEKKR

SEQ ID NO: 20018 - protein, 60 aa, Artificial Sequence
  Synthetic
EERVKRVIDELRELLRRSREEVKRVVEELKKELERSKREVERVIDELRRLLETVEKEIRD

SEQ ID NO: 20019 - protein, 61 aa, Artificial Sequence
  Synthetic
SELEDLKRRIRKSSEDSKKSLEDSDRTIEESSRDSSRTARESERKLEKVLREVDDILKKVK

SEQ ID NO: 20020 - protein, 60 aa, Artificial Sequence
  Synthetic
EEDVERIVRELEELVRKSREDHKRVIDALREKLKKSREEHRRVIDKLRRELKRVEDEIRR

SEQ ID NO: 20021 - protein, 61 aa, Artificial Sequence
  Synthetic
SILEKLEREVRKSSRESRESAKKSLREIEESSRRVEEELERLLREVRRVAEEVLDILRRKK

SEQ ID NO: 20022 - protein, 60 aa, Artificial Sequence
  Synthetic
REEVKRIIERLRKLLEDSKRDHEEVIKELRKLVEDSRRRVEEVIRRLRELLKRVADELRR

SEQ ID NO: 20023 - protein, 61 aa, Artificial Sequence
  Synthetic
DELEEALRRLKKIVEDLARRNEELLKELRRDSKRLKDEIKRVVDELRDIVRRLKEELDRVK

SEQ ID NO: 20024 - protein, 62 aa, Artificial Sequence
  Synthetic
ERLERRVREIIRRAEELLERSRKRSEEIAREAEKSNRELEDAVRRIIRELEELLEKLERDAR

SEQ ID NO: 20025 - protein, 60 aa, Artificial Sequence
  Synthetic
DEVDKVTRELREIMRKLKEDDKEVLDRLREDSERVERTNREVEKRLEAIIRDLEEKLRRK

SEQ ID NO: 20026 - protein, 62 aa, Artificial Sequence
  Synthetic
ERLKEKVDRIREEAKRLLEELEKHVRDSEREAEDSNRRSRETSEEIIRRLRKKVKELEDKVR

SEQ ID NO: 20027 - protein, 60 aa, Artificial Sequence
  Synthetic
SEVDKVEEELERIVKELKDRDREVLKRLRDDSERLVRELKKVAEELRKIAKDIDERLKEK

SEQ ID NO: 20028 - protein, 62 aa, Artificial Sequence
  Synthetic
ERLKDRVDKIREKARKLLEELKKHVDDSIEEAKRSNEELRKTVEKIIREAEKLLRDLKEAVK

SEQ ID NO: 20029 - protein, 60 aa, Artificial Sequence
  Synthetic
SEAEKVERELDKIIRELKETDKKVLEDNRRVVEKIEREMERVLRELERIMKELKEELDRK

SEQ ID NO: 20030 - protein, 62 aa, Artificial Sequence
  Synthetic
ERLKEKVDEIRKRAEELVKELARHVEKSIRESRELDKRLEEKVKEIIRRARELLEDLRRKAE

SEQ ID NO: 20031 - protein, 57 aa, Artificial Sequence
  Synthetic
SEAEKVRREVEDLIRTLEEVVRKSSEEIKELLRRLREVVERIRDTTRRLIEEIEKKV

SEQ ID NO: 20032 - protein, 59 aa, Artificial Sequence
  Synthetic
REDLERVLKEVREIVKRLLKRLEESLRDVRRIAEELREMLKRSLKRSEEIIRKLLEDVR

SEQ ID NO: 20033 - protein, 57 aa, Artificial Sequence
  Synthetic
DEVDTVDEKVKRLAEELRKRVRESKERTKKLARDLREAVKESLKDSERLAEDLRRKV

SEQ ID NO: 20034 - protein, 59 aa, Artificial Sequence
  Synthetic
REKLERVEREIEKLVREVEKILRDIHRDNERVVREVERRLEEITRRSRELAKRVEDETR

SEQ ID NO: 20035 - protein, 57 aa, Artificial Sequence
  Synthetic
DEVDEVARKVERDAERLEDLNRRSEETSRRLAEELRRLNERSERETERLAEELRREV

SEQ ID NO: 20036 - protein, 59 aa, Artificial Sequence
  Synthetic
KKKLEDILREIEKLIRRVEEISRRILEESKRLADEVRKITKKLHDDNKRLADRVKEETR

SEQ ID NO: 20037 - protein, 57 aa, Artificial Sequence
  Synthetic
REIDEIKERVDRLAEKLRRDMERSTRESRKLVEELKERAKRSKEETTKLAEELRRRV

SEQ ID NO: 20038 - protein, 59 aa, Artificial Sequence
  Synthetic
KEELERILREIKRLMDEVKRILEELLKTNKKLIDEVRKRLEELHKRNRELVEEVARRAN

SEQ ID NO: 20039 - protein, 61 aa, Artificial Sequence
  Synthetic
SEVEAVEKEARELVREDERRDDEIEEDLRRLLEENRRKDDKVEKEVRELLKRLRDKVDDRA

SEQ ID NO: 20040 - protein, 59 aa, Artificial Sequence
  Synthetic
KRDVKRVRDTVRDISRKNNRTTEELLKRVRDISRRNKEITEELLRRIREIAEDLARKLD

SEQ ID NO: 20041 - protein, 61 aa, Artificial Sequence
  Synthetic
SEVEKVEEEVKRLVEENERRVRESSREVEKLLREDAERDERASRELKKLLEKLKRAVDKRA

SEQ ID NO: 20042 - protein, 58 aa, Artificial Sequence
  Synthetic
RAVEKVLRTARKISEDNKRKNDEISERLRRISERNNRESEKLLRDLEKIIEDVERKLE

SEQ ID NO: 20043 - protein, 61 aa, Artificial Sequence
  Synthetic
REVEEVEKKARELVERDERTDERIRKELEDLVRENKKEVKRVRETIERLLRDLKKAVDERG

SEQ ID NO: 20044 - protein, 59 aa, Artificial Sequence
  Synthetic
EEDVKRVEKTVEDISRKNNEITKRLRDTVRRLSEKNRRDLEKALEDLKRIVDDVRRKIT

SEQ ID NO: 20045 - protein, 61 aa, Artificial Sequence
  Synthetic
SEVEEVEKEARELVKRDEDRDKEIEDKLRELVERNRRLVRKSSEELKKEIKRLKDEVDRRA

SEQ ID NO: 20046 - protein, 59 aa, Artificial Sequence
  Synthetic
KEKVEKVLKEVRDISRENNKTTDTLEKEVRRLSEENKRRNEEVTRRVRKILEDVERKAR

SEQ ID NO: 20047 - protein, 61 aa, Artificial Sequence
  Synthetic
KEVEDVEEEVKKLVEENKKAVDDSREEVRKLLEENKKAVDDSRKEVEKLAKKLKEAVDRRA

SEQ ID NO: 20048 - protein, 59 aa, Artificial Sequence
  Synthetic
KEKVKRVLDEAKKISDDNKRKNEEVSKELEKISRDNLKLNEDITREIREIVERVDERLE

SEQ ID NO: 20049 - protein, 61 aa, Artificial Sequence
  Synthetic
SEVEKVEKDLRKLIKDNRDSVRRVKEEAEKLVEENRRSVEEVRRTIKELLERLEKLVRDRG

SEQ ID NO: 20050 - protein, 59 aa, Artificial Sequence
  Synthetic
KRLVDKVRRELEKILRDDNRIIKEVLDTVRRLSEDNLKKVKDVLEELTRIAEEVRERAR

SEQ ID NO: 20051 - protein, 56 aa, Artificial Sequence
  Synthetic
SKVEDLLEKLERELEKNRKRTKELLKRAEESSEDIREKVRELRERLERLIEELERR

SEQ ID NO: 20052 - protein, 59 aa, Artificial Sequence
  Synthetic
DKLLEDLERLVRRVLDEARKINEELDKRVKDSVREVEKRLRELEEEVKRIIEEVEKKAQ

SEQ ID NO: 20053 - protein, 56 aa, Artificial Sequence
  Synthetic
EELERLARIVDEAHKRSRDLLETSKREVEDAIDEIRARLEDSRRLVEEVTDEIRRI

SEQ ID NO: 20054 - protein, 58 aa, Artificial Sequence
  Synthetic
ERLKELKKRLRDLIEENDRRAKESTKKIRDLAKELRERARRTEEEIKTLMKELEDRMK

SEQ ID NO: 20055 - protein, 56 aa, Artificial Sequence
  Synthetic
KELEDLRREVEEIHKTSERLLRESDKLVEEAIRRIEELLERSKDTVTKAADEVRKA

SEQ ID NO: 20056 - protein, 58 aa, Artificial Sequence
  Synthetic
ERLKKLKEDVKRLIEENRKRAEDTKRKIEEEIRRLKEEADRTSEEIKKRADDLRRRAD

SEQ ID NO: 20057 - protein, 60 aa, Artificial Sequence
  Synthetic
DELEEVDKLVKKVHEDSRKLIEDVDRKVREVVERSDRIIETVEELVERVITEVEDMLRKG

SEQ ID NO: 20058 - protein, 58 aa, Artificial Sequence
  Synthetic
DRLRKVEKRIEDLARENEKRNRDLERKIEKLADESRKKNEDLKKRIEDLAKRLKDEAD

SEQ ID NO: 20059 - protein, 60 aa, Artificial Sequence
  Synthetic
SSLETVREEVRRVKEESDRIIKEVRDRVEEVHKTSKRIIEEVEERVERVIREVREMLRRG

SEQ ID NO: 20060 - protein, 58 aa, Artificial Sequence
  Synthetic
ERLDRVVEDIRRLAEESRRKNEELRKEVEELVKRNKELNEKLKKKVKELAKELRDEAK

SEQ ID NO: 20061 - protein, 60 aa, Artificial Sequence
  Synthetic
DDLETVKRLVDEVIRTSEELIDTVRRLVEEVHRESERILKEVKKEVERVIREVEKLRRKG

SEQ ID NO: 20062 - protein, 58 aa, Artificial Sequence
  Synthetic
KDLERVRKRIEDLAKELERRNRELEEDIKRLAKENEELARELKKEIETLAKRLEDEDR

SEQ ID NO: 20063 - protein, 60 aa, Artificial Sequence
  Synthetic
SSLEEVDRRVKEVHKESDKIIREVDKRNKEVNRRSEEIIEEVEKTVEEVAKTVDDMLRRG

SEQ ID NO: 20064 - protein, 58 aa, Artificial Sequence
  Synthetic
RELKRVKEEIDRLVEEDKEKNERSDKRAKETVDKNKKLNDDLEEKIRRLAEELRRRKK

SEQ ID NO: 20065 - protein, 60 aa, Artificial Sequence
  Synthetic
SSLKEVERLAKELHEKSERIIREVEKLSRELHKTSEKIIRDVARRVKKLIDDVREVITRS

SEQ ID NO: 20066 - protein, 58 aa, Artificial Sequence
  Synthetic
EELEKLRKRVEDLVRRNEEENKRTLRESEELVKENRKRNKELRDRVEKLVEELRRELK

SEQ ID NO: 20067 - protein, 60 aa, Artificial Sequence
  Synthetic
KKLEDVKELVERLHRESEEIIRDVERRSRELAETVKKILEEVRRLSKKLVDEVREVIKRS

SEQ ID NO: 20068 - protein, 58 aa, Artificial Sequence
  Synthetic
KDVDRVDREVEELVKENRERNKDTKRESERLAEKLRRDVEKSLRDSERLVKELRDRLR

SEQ ID NO: 20069 - protein, 60 aa, Artificial Sequence
  Synthetic
KKLEDVKRLVDKLVTESEDIIRRVTEESRRLVEESRRVIEEVKKLSEELVRRVEKVIREK

SEQ ID NO: 20070 - protein, 58 aa, Artificial Sequence
  Synthetic
ERVKKVKRDVEKLVRDSRELNKRTREESERLVEESERLNEESRKESERLVRELREKLR

SEQ ID NO: 20071 - protein, 60 aa, Artificial Sequence
  Synthetic
SKLEDVERKVRELVRRSKRVIKEVERLVRELHKRSEDVLRKVKKDSRDLAREVKDVIRRK

SEQ ID NO: 20072 - protein, 58 aa, Artificial Sequence
  Synthetic
KDVDKVRRDVEDLVRESRELNKRLKREVEELAKENRRRVEESRRESEELAKELRERLK

SEQ ID NO: 20073 - protein, 60 aa, Artificial Sequence
  Synthetic
SSIEKVLRELEDIVRKIEERNKKSHDEVRRVVEEIKRRVKKSHEDVRRVVEKIDEDIKRK

SEQ ID NO: 20074 - protein, 58 aa, Artificial Sequence
  Synthetic
DEIRRVKERLDELIRRLEELIRRNVTELKRLIDDLRRLVEENVRRLKELIDKLREDVK

SEQ ID NO: 20075 - protein, 60 aa, Artificial Sequence
  Synthetic
SEIERVLEELKKIVRRIKEKLKESHERVREVVERLKRRNEKSHRDVRRVAERIRREIEKK

SEQ ID NO: 20076 - protein, 58 aa, Artificial Sequence
  Synthetic
KDIREVKKEADRLIKELRDLIETNEREMKKLIDELEELIRDNARRLEELIKRLEEEVR

SEQ ID NO: 20077 - protein, 61 aa, Artificial Sequence
  Synthetic
SELEKVLEEAKRVVDEIKKKLEESHKDNRRTVEEIKRRNKESHERLKEAVDKLKAEIEKKR

SEQ ID NO: 20078 - protein, 58 aa, Artificial Sequence
  Synthetic
DRIREIAEELDKLIRELEKLVKRNADESDKLLDELRKLVEDNEREAERLIKELEDEAR

SEQ ID NO: 20079 - protein, 61 aa, Artificial Sequence
  Synthetic
SEIERVLRELEKIVEELKRENEDVHRRVREVVKKLKDENRKSHEEVKRMVDKIREEIKRIR

SEQ ID NO: 20080 - protein, 58 aa, Artificial Sequence
  Synthetic
DDIRRAAEKVDKLIKELEDLIRRNAEELRKLIEELEELIRRNRERLKRLIEDLKRAVE

SEQ ID NO: 20081 - protein, 57 aa, Artificial Sequence
  Synthetic
SEMERVEEEIRRLLKELDKKARDVHEADKELVKENRKLADEVERDLRRLLEELRRDV

SEQ ID NO: 20082 - protein, 59 aa, Artificial Sequence
  Synthetic
KKAIEDVLRKIKKLVEDLKRRIEEVLRESEALNEDTKRLIEEVLRDVRRTIDRLKKEAK

SEQ ID NO: 20083 - protein, 57 aa, Artificial Sequence
  Synthetic
SDMDRVEKELEELLRENEELAKDIHRRDKELLEENRELVRRAEEELRRLLEELARDV

SEQ ID NO: 20084 - protein, 59 aa, Artificial Sequence
  Synthetic
KEVIKDVLRKVRKINKETKELLRTVLEKSEKLNRDTKKRIKDVLEKIKRLIDELRERAR

SEQ ID NO: 20085 - protein, 57 aa, Artificial Sequence
  Synthetic
KEREDIEDRVRKLIEELEESVRRSNETVKKLLRELEKLLEDSNRSVEELARDLRRKV

SEQ ID NO: 20086 - protein, 55 aa, Artificial Sequence
  Synthetic
EKVLRKVEKVVEDLKRHNRKVNEEIKRVAEKLKRELEEVNKDIRRMARKLEEEVR

SEQ ID NO: 20087 - protein, 57 aa, Artificial Sequence
  Synthetic
SEAEKIAEDVERLARDLERLLKESNDTVRTLIEDLRRSVEETAKEVRDLIEDLRRRV

SEQ ID NO: 20088 - protein, 55 aa, Artificial Sequence
  Synthetic
EEVLKELKKVADELRRILEDVNRRIRKVVDDAREHNKKVVEDVRRVAKEARDRVR

SEQ ID NO: 20089 - protein, 59 aa, Artificial Sequence
  Synthetic
DEVEELERRIEKLAREVKKEIKDALRRNKRLIDEVKKIIEDVNRENRRLMEEVKRLIDA

SEQ ID NO: 20090 - protein, 58 aa, Artificial Sequence
  Synthetic
DELRRIAKRVEDLAEELKRLLDKSRETSERLVDELRKLLRESNETSKELVKRLDDRRK

SEQ ID NO: 20091 - protein, 59 aa, Artificial Sequence
  Synthetic
SEAEKLLKEAKRLADEAKKIIKRAHEENKRAADEAKKIIEEANRENEKLAREAKKLIDA

SEQ ID NO: 20092 - protein, 58 aa, Artificial Sequence
  Synthetic
DEAREIEKRVRELAEELKKLARESNEASKELAKELKELAERSNKTSEDLAKELEDRAR

SEQ ID NO: 20093 - protein, 59 aa, Artificial Sequence
  Synthetic
SEVERLLEEIKELAKRVKDIIKEVNKENKRLVDEVKDRIRKINEDNNRLVETVKELIRK

SEQ ID NO: 20094 - protein, 58 aa, Artificial Sequence
  Synthetic
KELERIEREVERLADELRKLLEESNESTERLAEELERLVRESERDSRRLAEELKRRLD

SEQ ID NO: 20095 - protein, 60 aa, Artificial Sequence
  Synthetic
SELEKLKEEIKKLADDVKRIIKKVLDENRKLVDDVKKIIKKVTEENRKLVREVAELIKAG

SEQ ID NO: 20096 - protein, 58 aa, Artificial Sequence
  Synthetic
KELEEIDKDVDRLIEELKRLLEDSNRDTERLAKELKDLLDESNKDSRRLAEELKRRTD

SEQ ID NO: 20097 - protein, 59 aa, Artificial Sequence
  Synthetic
REVDELRKEIRRLAKEVKDIIKKATERNEELVRRVKEIIKEVNRRNRKAAEEVKELIRA

SEQ ID NO: 20098 - protein, 58 aa, Artificial Sequence
  Synthetic
EDLERIRKEVEELARELEKLLEESNRETKRLARELEKLLEDSRRSTEELAKELEEAER

SEQ ID NO: 20099 - protein, 57 aa, Artificial Sequence
  Synthetic
REAEEVDKEIKKIVRDVRERIRKLNEDNRRIAEKVKREIEELNKRNRDTAKEIEKRG

SEQ ID NO: 20100 - protein, 58 aa, Artificial Sequence
  Synthetic
DELREIERDVDRLVEELRKLVEDSRRTTKRLVEELDELVETSDRETEKLVRKLRERER

SEQ ID NO: 20101 - protein, 57 aa, Artificial Sequence
  Synthetic
SDLERVLREIKKEVDDVKRLIRELNERNRTIVEEVKKLIEKLNRDNERIVREVKKRG

SEQ ID NO: 20102 - protein, 58 aa, Artificial Sequence
  Synthetic
EEVKRIEDEVRKLVRELEELLKRSDDDTERLVEELKELLKRSEKKTRELAKELRDRRR

SEQ ID NO: 20103 - protein, 57 aa, Artificial Sequence
  Synthetic
SEVDEVLKRIKEEVDRVKEEIKRLNKENNDIVRKVKKEDRDIVETIRKIAEDVKRRG

SEQ ID NO: 20104 - protein, 58 aa, Artificial Sequence
  Synthetic
DELREIDERVEKLVKELEETLRESEKDTKRLVEELEKSLKETEDDVRRLVKELKDRDD

SEQ ID NO: 20105 - protein, 57 aa, Artificial Sequence
  Synthetic
SKLEEVLRDIRRIVEEVKDEDRRIVEEIRKIAKDVKEKIKELNRENNRIVREVKERG

SEQ ID NO: 20106 - protein, 58 aa, Artificial Sequence
  Synthetic
DELRRIDEEVEKLVKELEKSVEDTKREVDRLAKELEDLVRDSKRDTDRLVKELKDRTD

SEQ ID NO: 20107 - protein, 57 aa, Artificial Sequence
  Synthetic
REVEEAADDLRRLIEENERSVRESKRTLEELIKENEDSVRRSEKSLRDLIRELEEEG

SEQ ID NO: 20108 - protein, 56 aa, Artificial Sequence
  Synthetic
VEELLKRVRDVSEESKRLDRKLNEDVKEVSKDSKRRDRELNERVRKVAEDVKETER

SEQ ID NO: 20109 - protein, 57 aa, Artificial Sequence
  Synthetic
SEVEEAAERAKRLIDKLKESADRSEKTARDLIRDLNRSTEEIAREARKLIEELKKAG

SEQ ID NO: 20110 - protein, 56 aa, Artificial Sequence
  Synthetic
VKKALEEVRRAAEEAEKADRKLNKEVKEAADRARELNKKLADEVRKAAKEAKEKAD

SEQ ID NO: 20111 - protein, 57 aa, Artificial Sequence
  Synthetic
SEVEEAAKEAKRLIEELNRSTEKIARDAKKLIEELRKSAKESADSARKLIEELKKRG

SEQ ID NO: 20112 - protein, 56 aa, Artificial Sequence
  Synthetic
VKKALEDVKRAADKAKEDNKKLLKEVEDAAREAKRADRELNKRVKEAADKAKEEAN

SEQ ID NO: 20113 - protein, 61 aa, Artificial Sequence
  Synthetic
DELEEVRERIERLIRRSEELNKKVEKENKELVDRSREINRRVLDEIRRLIREVERILEEEG

SEQ ID NO: 20114 - protein, 59 aa, Artificial Sequence
  Synthetic
EEEVRKLEEEVRELIKKLERSNRELNKETEKLVEDLKRSNKELEEDVERLARKLEEELR

SEQ ID NO: 20115 - protein, 61 aa, Artificial Sequence
  Synthetic
KELEEVEKRIEELARRVEERIKKVIEDNRRLVEESEKINEEVRREVKRLIDEVKEIIRRKG

SEQ ID NO: 20116 - protein, 59 aa, Artificial Sequence
  Synthetic
EREVRRLEERVEELARRLEELLKESNTRSEKLARDLEKSNEDLEREVEELAKRLEEELK

SEQ ID NO: 20117 - protein, 61 aa, Artificial Sequence
  Synthetic
DSVREVAERIDRLVKESERINREVIETNRRLFKESEKINDKVRKEIEDLIRRVKEIIDRDG

SEQ ID NO: 20118 - protein, 59 aa, Artificial Sequence
  Synthetic
EEDLRRLKKKVDDLARKLEESNRRSNEDSKRLARELEESNKDLKRRVDELARELEERLK

SEQ ID NO: 20119 - protein, 61 aa, Artificial Sequence
  Synthetic
DELKEVEERIERLIRESKRVNEEVKETNRRLVRESKEINKRVHDTVRRLVEEVRRIIDERG

SEQ ID NO: 20120 - protein, 59 aa, Artificial Sequence
  Synthetic
EKEVRRLREEVEKLAKELKRSNDESNKESERLVEDLKRSNTENSKAVEDLARELKERLK

SEQ ID NO: 20121 - protein, 60 aa, Artificial Sequence
  Synthetic
RSVEELKKKVEDLVRKLEELVKDSKRESKELVDDSERLVKELEDDVRRLVRELRERVRRR

SEQ ID NO: 20122 - protein, 59 aa, Artificial Sequence
  Synthetic
ERIIKRIEEEIEELIRRVEEIIRKVIKENRELVERDREIIKTVLERIRELIKEVTDRIE

SEQ ID NO: 20123 - protein, 60 aa, Artificial Sequence
  Synthetic
SEVEKLEEEVERLVRDSERLNKRLEDRVKKLVEDSERLVRELEKTVRDLVKKLKDDVRRR

SEQ ID NO: 20124 - protein, 59 aa, Artificial Sequence
  Synthetic
ERIIRRIRKEIKDLFDDDKRISEEVERRIERLFKEDKKIIEDVEREIRRLIKEVEDRIR

SEQ ID NO: 20125 - protein, 60 aa, Artificial Sequence
  Synthetic
DDVERLERRVRELIKESEKLVDDLRKDVERLVKKSRDLNERLREDVERLVKELEDRVRKR

SEQ ID NO: 20126 - protein, 59 aa, Artificial Sequence
  Synthetic
KEIIDKVRKEIEDLVRKDKEIIDEIRKEIRRLVEEDEEISRRVEETIRRLIREVAERIR

SEQ ID NO: 20127 - protein, 57 aa, Artificial Sequence
  Synthetic
SEVDELRKRVEELVRRSRKLVEEHRRKVRELVEESRRLVEELRRDVERLVKKLRDEL

SEQ ID NO: 20128 - protein, 60 aa, Artificial Sequence
  Synthetic
ARDLIEEVRERADRVAKKDEDVIRKSEEDTERVVREDKKIIDRVRKDVEEVIRRVEEETR

SEQ ID NO: 20129 - protein, 61 aa, Artificial Sequence
  Synthetic
STLERLTEDVKRVIREVEEVIKKLKEEVDKSLEDVRRKIEESRKETKRVIDEVKRRIKDKR

SEQ ID NO: 20130 - protein, 56 aa, Artificial Sequence
  Synthetic
VEELAKRLEELIRRLEELVDRLRKELKESIEEIRKRVRDHKEESKRLIRELDEEVK

SEQ ID NO: 20131 - protein, 61 aa, Artificial Sequence
  Synthetic
STLERLDEDVKRVAREDTELIKESEERTKKSADDVRKKIEDSRRTTDKVVTDVEDIIEKKR

SEQ ID NO: 20132 - protein, 56 aa, Artificial Sequence
  Synthetic
VEELAEKLKELLKDSERRVDEHRRKSEESTREIEELVKRHEDRSRELIKRLDEEVR

SEQ ID NO: 20133 - protein, 60 aa, Artificial Sequence
  Synthetic
SLLEKLRRRVDEVIKRDDELIEESKRRTDEALKRVEERIRKSLEETKEAVDRVRDIIRRV

SEQ ID NO: 20134 - protein, 56 aa, Artificial Sequence
  Synthetic
VDELRERLRKLLEDSEEKVKRHKDESDKLIKDIEDKVKRHEDESRRLIRELREELK

SEQ ID NO: 20135 - protein, 56 aa, Artificial Sequence
  Synthetic
SEADELRKKLEETNKDIKRRVEELKRRLEESNERIEELVRRNEKKSKDLLDDVRRR

SEQ ID NO: 20136 - protein, 59 aa, Artificial Sequence
  Synthetic
EEVLKRLDKKLEDSRRDVERVEKEVEELLRESEERVKRVVETVDKTDEEVKKDVDDKRR

SEQ ID NO: 20137 - protein, 56 aa, Artificial Sequence
  Synthetic
SEAEDLEKKAEDTNREIKKIAEELKKHAEDTNREIEKKVEDLRREAERILREVARK

SEQ ID NO: 20138 - protein, 59 aa, Artificial Sequence
  Synthetic
EEVLERLERKLRESKREVDRLAEKIKKLNDDSRKRVDEVVERVRRLLEDVKRKVDEARR

SEQ ID NO: 20139 - protein, 58 aa, Artificial Sequence
  Synthetic
DEVERLEEDVERSIRDSEKVVRDSERRVRESNEEIRRLIEESDKDVKRLIDEATKKSG

SEQ ID NO: 20140 - protein, 59 aa, Artificial Sequence
  Synthetic
REVIRELKERLKEISDRLKKRSEKSVRDLDDISRKIVRRSEDTVRKLREIARRLDERTK

SEQ ID NO: 20141 - protein, 58 aa, Artificial Sequence
  Synthetic
REKDELEEAVRRSNKRLKDILEKSRKDVEESIKRSEELLKRSDDEARKLIEEMTRKSG

SEQ ID NO: 20142 - protein, 59 aa, Artificial Sequence
  Synthetic
RKVIEDVLRELKKITDEIEKESRRSLDELRRISKELEDDSRRTLEELKKIVKELKDRET

SEQ ID NO: 20143 - protein, 58 aa, Artificial Sequence
  Synthetic
DEDRRLEEEVRKSIEESERVIERSEEEVRRLIEEARTLLEDSRRKVEDLLREMTRRAG

SEQ ID NO: 20144 - protein, 59 aa, Artificial Sequence
  Synthetic
REVIEKVLRELREISERLKRESERSLRELEEIARDLLRRSRRTVEELRRIAEELVKRAK

SEQ ID NO: 20145 - protein, 60 aa, Artificial Sequence
  Synthetic
DELEEVLERIEREIRRVSERSEELSRRNEKIIREVEEESRRILEEIKREIDEVKKRAERV

SEQ ID NO: 20146 - protein, 62 aa, Artificial Sequence
  Synthetic
EEAKKLVREVEETVRKLVEELREMNKRHEDKNRELSDRLREIDKRLEDEVRKLVEELRKKVE

SEQ ID NO: 20147 - protein, 60 aa, Artificial Sequence
  Synthetic
DELEEVEKEMERIIREVERKLREVNERIKEIIERVIRESKEILDELKRIIDEVKKRAERV

SEQ ID NO: 20148 - protein, 62 aa, Artificial Sequence
  Synthetic
EDAERLVRELRKKVEELKRRLEELNRDDKRTIDELVKTLDKIDRELRKTVEDLVRDLERDVK

SEQ ID NO: 20149 - protein, 57 aa, Artificial Sequence
  Synthetic
SKVDEVLKDVRRISEESERRIRELNDRSRKISKESEDRIRELLRRLEEIVERLKRTN

SEQ ID NO: 20150 - protein, 56 aa, Artificial Sequence
  Synthetic
AEELRKEVERLIRENEELVERHRKTVEELRRRNEELVKRLEDTVRKLEKELKEEAD

SEQ ID NO: 20151 - protein, 57 aa, Artificial Sequence
  Synthetic
SELDRAADRLRKISKRSEEEIRKLNEEVKKISKESEEKIRRLNEEVKRIVEEVKRRN

SEQ ID NO: 20152 - protein, 56 aa, Artificial Sequence
  Synthetic
AKELAEIVEKLIRDNRRLVEEHEESVRRLEDRNRKLVEDHERTVRKLIKELRETRR

SEQ ID NO: 20153 - protein, 57 aa, Artificial Sequence
  Synthetic
SELEKLLRDLEEIARKVEEEIRTLNEDVKRISKESKERIDRLKEELKKIVDDLKKRR

SEQ ID NO: 20154 - protein, 56 aa, Artificial Sequence
  Synthetic
AEDLRREVERLIRELRKLVREHERSVRKLIEENRRIVRELEELVKKLRKELEDTLR

SEQ ID NO: 20155 - protein, 57 aa, Artificial Sequence
  Synthetic
SELEEAERRLREIVRKVEEDSRKLNEELKREVDEVRRRSEELNKRVRDEAERVRKEN

SEQ ID NO: 20156 - protein, 58 aa, Artificial Sequence
  Synthetic
EKAEDLARIVKKLVEDLKRLNKRHKESVDELVRRLEELDREHERTIRRMIEELRETER

SEQ ID NO: 20157 - protein, 60 aa, Artificial Sequence
  Synthetic
KEVEKLLEDLKEVARRVSEEIKRLLKELKEVSKRSEDRIRTSLERVKKVVEDVLREADEF

SEQ ID NO: 20158 - protein, 55 aa, Artificial Sequence
  Synthetic
RELKEEIEKLLRRLRKLVKELKEEIKKIVDRNRKLVREHEARSEELKEEIRREVE

SEQ ID NO: 20159 - protein, 60 aa, Artificial Sequence
  Synthetic
SEKEELLKRVAEVSKKSKDRARELNERLKKVVDEVLETIRKLNEDLKRVVERVKEKIKDK

SEQ ID NO: 20160 - protein, 55 aa, Artificial Sequence
  Synthetic
KELRKEAKRNVDENREVVKENKRTTEKLLRDLDRILKENKRTVEKLVRELREEVR

SEQ ID NO: 20161 - protein, 60 aa, Artificial Sequence
  Synthetic
DEKERLLEDVKRASEDSERRIRELNDRVRRVSEESERRIRKLNKELRDEVEKVLREIDRI

SEQ ID NO: 20162 - protein, 55 aa, Artificial Sequence
  Synthetic
DELREEIEKNLRRNEELVKKNKKDSEDNKRDNDRLVKENEKTTEDLLRRAKEEVD

SEQ ID NO: 20163 - protein, 60 aa, Artificial Sequence
  Synthetic
DETETVEKKLRDVLERVKKDSEDSREELKRVHKRSEELSRRSNKELDDVLDEVRRIIERS

SEQ ID NO: 20164 - protein, 55 aa, Artificial Sequence
  Synthetic
EELKKRLDEMRKTIEKLLEDTKEELRELIERNKKLLDDTARRAEEIIKEIEDRSK

SEQ ID NO: 20165 - protein, 60 aa, Artificial Sequence
  Synthetic
SREEKVLEDLDRVLKRVTDLSKESLDEVERVHEESERLIRDSNRVLRDVLEKVREIITKS

SEQ ID NO: 20166 - protein, 55 aa, Artificial Sequence
  Synthetic
KELKDRAREVIRRIEKLVEDTERALRDLIRKNEELLKRTEEELKRAEEDIRRKSK

SEQ ID NO: 20167 - protein, 61 aa, Artificial Sequence
  Synthetic
SDAERVLREIERLLEELKELVERVVRKSEELLRRAKRVNEEVNREIKKLADELEEVIRRKG

SEQ ID NO: 20168 - protein, 59 aa, Artificial Sequence
  Synthetic
KEVVDTLRRVVEEITRELEELLERLRRVSEEIRRTLEELLERTRRLVEEIERKLREALK

SEQ ID NO: 20169 - protein, 61 aa, Artificial Sequence
  Synthetic
SELDDVRRKIKRLIDELKRVNEKVNKDSEDLVREVERVNRDVNRRVKELLEELKRVIDERG

SEQ ID NO: 20170 - protein, 59 aa, Artificial Sequence
  Synthetic
EEMVERLRREVEKLERELRELLRRTEENSRRAKERLEDLLRRTRELVKRIEERLREELR

SEQ ID NO: 20171 - protein, 60 aa, Artificial Sequence
  Synthetic
SDVERLKKRVDELAERLKRLDEELKKEVDRIETELRELLKRHEDRNRDISRRLAELLKDA

SEQ ID NO: 20172 - protein, 59 aa, Artificial Sequence
  Synthetic
KEIVERILEELDRLMEKVERVSREILKTIEKLARDIKKRIEEVTRESERLAREVEEALR

SEQ ID NO: 20173 - protein, 60 aa, Artificial Sequence
  Synthetic
DEVETLEKRVRELERRLEELNKELREEVRKIVERAKELDKRHKDDNERIEKELRELLRDV

SEQ ID NO: 20174 - protein, 59 aa, Artificial Sequence
  Synthetic
DEIAKRILDEIDRLMEEAEKVTRDILRKVEELLRRVEDASRRVTKKSRELLKKVKEDLR

SEQ ID NO: 20175 - protein, 60 aa, Artificial Sequence
  Synthetic
SEVETLEKAVRDIVERLKDLNRRLEKEVRDAVKRLRDLLREHEKRNREIAKDLTDKLRKA

SEQ ID NO: 20176 - protein, 59 aa, Artificial Sequence
  Synthetic
KEAATDILRKAEELADEVRRATEEIAKEIRRLVKEVEEVIKDVTRKSDELLKRVADAAK

SEQ ID NO: 20177 - protein, 60 aa, Artificial Sequence
  Synthetic
DELETLADVVRKLIERSRDLLRRHEKRNDEIKKRLDELDRELKERAEEIKKRLEELLRRR

SEQ ID NO: 20178 - protein, 60 aa, Artificial Sequence
  Synthetic
AEDVVRDVLRKAEKVVEEDERLIRRVTEESDRVLDRVEKETKKIVDEAKRMLREVEERIR

SEQ ID NO: 20179 - protein, 60 aa, Artificial Sequence
  Synthetic
SLIDELRERVKEIKKRSEELLKRHEDENRRIVKRSRELLKKLRDVVRDIIRELRKELEDD

SEQ ID NO: 20180 - protein, 60 aa, Artificial Sequence
  Synthetic
AEEVVRRVLKEAEDLLRKDEKILRDVTRRSEKALREDEELAKRVLDEMRKVLEDVKRKSK

SEQ ID NO: 20181 - protein, 60 aa, Artificial Sequence
  Synthetic
EELERLAESVRRIKERLKKLDREHEERNKRIVETSRKLLEELEREVRKIEEDLKRLLDER

SEQ ID NO: 20182 - protein, 60 aa, Artificial Sequence
  Synthetic
AEEVVRDILRRLEELMRRAEEVTKKLTDDSRRLLKEDEDLVREIEERLRRLLKEVKERVD

SEQ ID NO: 20183 - protein, 60 aa, Artificial Sequence
  Synthetic
DEDRDVKREVKKVHEDSARTVEKLDREVEKVHEESERTVRKSEKEAKEVLDRVKDIVKKK

SEQ ID NO: 20184 - protein, 55 aa, Artificial Sequence
  Synthetic
EELKEDLKRILKENEDLVRELEKKLDDIMRENEELVREHEEKSKRIVRELEEEVR

SEQ ID NO: 20185 - protein, 60 aa, Artificial Sequence
  Synthetic
EEKERADRKLEEVHKESKKTVEDSDEALERVHRESKRTVEESRKTLEDVVREVKRIVEEK

SEQ ID NO: 20186 - protein, 55 aa, Artificial Sequence
  Synthetic
KELRRKVEEILKRNEEEVRKHKEKSKKIVEDNRRLVKRHKEESEEVVRDAAREVK

SEQ ID NO: 20187 - protein, 61 aa, Artificial Sequence
  Synthetic
DEDREALKEVEDVHRRSEEKVRESRRRAEEVHKESKKIVDELRRRSEESLKRVEDEVRKKR

SEQ ID NO: 20188 - protein, 55 aa, Artificial Sequence
  Synthetic
EELKDELRKIVETNRELVRRHHETVKKIMEENERLVRELEKRLEEADRKLEEEVR

SEQ ID NO: 20189 - protein, 61 aa, Artificial Sequence
  Synthetic
SLEEEVRRIVDDIRRTNKELLDRSARRAEEIERRLEELLRRSRERADRIREEMRRMLEKAG

SEQ ID NO: 20190 - protein, 59 aa, Artificial Sequence
  Synthetic
KKTVDDVLKRLKEENDRSREEIKRSNEESDRVLDEVRKRSEDSNRRLDKIVDEAKKELK

SEQ ID NO: 20191 - protein, 57 aa, Artificial Sequence
  Synthetic
DELEEVLERLREIAERVIKESKEINDELKRSSERSKRESDKVNKRMREIMKELKDRG

SEQ ID NO: 20192 - protein, 59 aa, Artificial Sequence
  Synthetic
EEDVRRIRKLVEDIARRLKEIIERNRESVRKSREENKKSIEENRRSVKKIADEAREDAR

SEQ ID NO: 20193 - protein, 57 aa, Artificial Sequence
  Synthetic
EETERLIEAVKRIAEEVRKTIERLMERVEKTTRESEELNRRLNRELDREVEEVERAN

SEQ ID NO: 20194 - protein, 55 aa, Artificial Sequence
  Synthetic
EELEKVVREVAERLDRLLKALRDLVEESARRNKRLIEETDRRIKEIAERLKRTSD

SEQ ID NO: 20195 - protein, 60 aa, Artificial Sequence
  Synthetic
SEAERLLEELERSTRESAKRIRDLADKLRRSSEESVKDIERLTKELEEAVRRVLDKIRKK

SEQ ID NO: 20196 - protein, 59 aa, Artificial Sequence
  Synthetic
EEVVRRLAKVVEESRRTNEKLLRDLEKLVEDSKRRNDELLEKNARRIKEVEDELKRETK

SEQ ID NO: 20197 - protein, 60 aa, Artificial Sequence
  Synthetic
KDAEDLLRRLRESTKRSEDLVRKLLEELERSSRESEKLIRELTDRLDKVVKDVERRIREK

SEQ ID NO: 20198 - protein, 59 aa, Artificial Sequence
  Synthetic
EEVVKRLEKAVKESEDRNKELLDRLRKRVEDSKRRNDKLLKENRKRIEEIKRRLDELLR

SEQ ID NO: 20199 - protein, 60 aa, Artificial Sequence
  Synthetic
SKAEKLLRDLEKSTEDSERRIRELLERLRESSRTSEELAKRLEEEVERATREVADKIRKK

SEQ ID NO: 20200 - protein, 59 aa, Artificial Sequence
  Synthetic
KEVVDRLREIVERSREKNRKLLEDLRRAVEESKKRNEEVLRKLKKKVEEIEEELKERLR

SEQ ID NO: 20201 - protein, 60 aa, Artificial Sequence
  Synthetic
SEIEELLKTLKRSTEKSEEDARRLLEELTRSSEESVKRLRDLTERLKEVAKEVIERIRRR

SEQ ID NO: 20202 - protein, 59 aa, Artificial Sequence
  Synthetic
KKVVDRLKRMVDESRKRNEELLKRLEKRVRESRKRNDELLEENKRVIDKIREELERLRK

SEQ ID NO: 20203 - protein, 60 aa, Artificial Sequence
  Synthetic
SLLEEIEELVRRAIDTVRRSSEELKRLVDRVNETNKRSTEELRELAERVDRRLDKLLKEI

SEQ ID NO: 20204 - protein, 59 aa, Artificial Sequence
  Synthetic
RELVEKLKRELRRILEEVRRLNEELMKEIRDTNRKSEKLNRDLKEEIKKILEDVEREVR

SEQ ID NO: 20205 - protein, 60 aa, Artificial Sequence
  Synthetic
DEAEKLKERLKRVLRRVREINRKLLDELRKSNEKVRRINKRLKEELKRVLDEVEKRVRED

SEQ ID NO: 20206 - protein, 59 aa, Artificial Sequence
  Synthetic
EKLVREIEEMVRRLKEEAEKLSEEIRKIVRESRETLKKLSDEVRRLVERAEEKARKDTK

SEQ ID NO: 20207 - protein, 61 aa, Artificial Sequence
  Synthetic
KEDDDLRREIERLLRELEKMNRKVLEDARRLLEELRRVNKEVAERIKDLERRLKDVVEKKG

SEQ ID NO: 20208 - protein, 55 aa, Artificial Sequence
  Synthetic
ERVKEEVDEIRDRLRKSNETLREIVRRIEEDLRKSDRELEELVERIEKRLRELVR

SEQ ID NO: 20209 - protein, 60 aa, Artificial Sequence
  Synthetic
KLVEEVKRLIEESARKNEELIKEVEKEIRRSRKRDKELIEEIERLIREVKKRLEELLTEK

SEQ ID NO: 20210 - protein, 62 aa, Artificial Sequence
  Synthetic
EEAEELVRRVKEEIKRSTTESEKLVKEVKDRARKSHEDSERLAREVLKEIRRLLEEVEKDVR

SEQ ID NO: 20211 - protein, 60 aa, Artificial Sequence
  Synthetic
KEVEDVKELIKKVNEEIKKIHERSNEEIKRVNEELRKIIKKVKDDLRRVLEEIERLSREG

SEQ ID NO: 20212 - protein, 59 aa, Artificial Sequence
  Synthetic
EDLLREAEKLVEDSRRSSEELVRRDKKLVKESRETSERLVRDLERLLREIEKRVREEAT

SEQ ID NO: 20213 - protein, 60 aa, Artificial Sequence
  Synthetic
SEVETVAELIKDVNRRIREEVEEVKRRIEELNDRNRKIAEEVKERIRRVEDEIREARKRG

SEQ ID NO: 20214 - protein, 59 aa, Artificial Sequence
  Synthetic
DELLTRIDRLVKDSERSSRKLVRELEELVRRSEEETEKLVRELERLVTEVARKVDEEAT

SEQ ID NO: 20215 - protein, 60 aa, Artificial Sequence
  Synthetic
KDVEEALETLKRILDRVAKDNEDLIRELRDINRKITKENEDLIRDLERILREVEEEVKRR

SEQ ID NO: 20216 - protein, 59 aa, Artificial Sequence
  Synthetic
DELRRRLEALVEDVRRTLKELIEKTEKVVKEVEDNLRRLLKRTEEVVREVEKKLEEDRR

SEQ ID NO: 20217 - protein, 60 aa, Artificial Sequence
  Synthetic
SEVEKVLEDLKRILEEIARRNEELNERLERINEEITRRNEKSNEETKRVLDKLADDVRKR

SEQ ID NO: 20218 - protein, 59 aa, Artificial Sequence
  Synthetic
EELERTLEKLVDEVRKRLKELLDRSRELVKRVRENLERLEEDTRRLVERVRRELEKLRK

SEQ ID NO: 20219 - protein, 60 aa, Artificial Sequence
  Synthetic
DEAEKVKRDIEEILKRVAEELKRVLEEIRRSSEEVERRNKEVLETLKRILEEVKERLKRI

SEQ ID NO: 20220 - protein, 58 aa, Artificial Sequence
  Synthetic
ELVRELRELVRRIEEELRKLTEEARKLLEDNRRRLEELDRELKELVDRIREELERARK

SEQ ID NO: 20221 - protein, 60 aa, Artificial Sequence
  Synthetic
DEAEKVLEDIKRSSEEVTRRNEKVARDSRKLSEDVEKKNRDVAERIKEIVDKVRRDLSRI

SEQ ID NO: 20222 - protein, 58 aa, Artificial Sequence
  Synthetic
ELVERARELVETNKKRLEDLDRELEELVKENEERLKRLDERLKELVDDIRRRAEEARK

SEQ ID NO: 20223 - protein, 60 aa, Artificial Sequence
  Synthetic
REAEELLKDLERSSEEVDRRVKESNKESEKVSRDVEKKVKDSNKELREITREVAERAKRT

SEQ ID NO: 20224 - protein, 59 aa, Artificial Sequence
  Synthetic
EKMIKRAAELLKTSEDRLRKLIKESEDSIRENEKKLRELIRESEETLREIRKRLEDLER

SEQ ID NO: 20225 - protein, 60 aa, Artificial Sequence
  Synthetic
KEAEDLMEELKKSSEDVERRVRESNKRSKEVSDRVAEEVKKLLERLKKILEEAARKRDRV

SEQ ID NO: 20226 - protein, 59 aa, Artificial Sequence
  Synthetic
EKVIRTIERLVRTSEKKLRKLLDDSRKSVEENRKRVTDLKKEARDLVEDIKRRLEEERR

SEQ ID NO: 20227 - protein, 61 aa, Artificial Sequence
  Synthetic
REEEKVLKDLDDVLKEVTERVREDLRTNEDVVRRAEEEVTRLHEELKRSNDRAKEEVDRKK

SEQ ID NO: 20228 - protein, 55 aa, Artificial Sequence
  Synthetic
EEVRKLVRELKEMLKRLEEDARRLVETTKKRLEDLKRTTDKLVKELEKTLEELRR

SEQ ID NO: 20229 - protein, 60 aa, Artificial Sequence
  Synthetic
SDRERVAKKLRDVLKEVDEEAKKDHDTNKTVVKKVREDIERILRRLKEVLRKVKEEAERK

SEQ ID NO: 20230 - protein, 55 aa, Artificial Sequence
  Synthetic
EELRKLVKELRDRLRELEESSRKLVEDTRRDLERLREEIDRLVEELERRLEELRR

SEQ ID NO: 20231 - protein, 61 aa, Artificial Sequence
  Synthetic
SDAETVLREIRKLNKEVNDASRETLERIEELNRRVERIVREVLKDIERLAREVEEVVRREG

SEQ ID NO: 20232 - protein, 59 aa, Artificial Sequence
  Synthetic
EELIRRLEEIVKESEDNSKENVDRNDRIVRESERSSKELEDELRRIVKKLAREVDELIR

SEQ ID NO: 20233 - protein, 61 aa, Artificial Sequence
  Synthetic
DDVERVLERIKELNRRVEEIVRRVLKTSRDLNKELNDISREVLKRIKDLMREVEEVVRRDG

SEQ ID NO: 20234 - protein, 59 aa, Artificial Sequence
  Synthetic
EELIRELERIVEESKRTSDKLAKELDKLNEDSERNSRKNIEDLRRLVEELARKAEELIK

SEQ ID NO: 20235 - protein, 60 aa, Artificial Sequence
  Synthetic
SLVEELEKLVEENERNMRELDKENRDIVEKNRENVERNERELRKLVERLERRIREVVRTK

SEQ ID NO: 20236 - protein, 60 aa, Artificial Sequence
  Synthetic
LEEIVREVKERIKRSNDEANKENKRTLDEIRDSNRDVNRVSKEVLDEIRRLLKELEDAAK

SEQ ID NO: 20237 - protein, 60 aa, Artificial Sequence
  Synthetic
SLIETLEELVDRNRRNLEKLDEENKDMLRKNEEDVEKNERDLRKLVKELRDEIRKLIEEK

SEQ ID NO: 20238 - protein, 60 aa, Artificial Sequence
  Synthetic
LEDIVREVIKRIEESNRRVNKRNRETLERSKKSNKDVNEASERVLRRIKELLDELRERAK

SEQ ID NO: 20239 - protein, 60 aa, Artificial Sequence
  Synthetic
SLEEELRRLVEELEKRLRELDKRNKDLLRENERNVEKLARDLEELVKKVRRVVEDVVTKK

SEQ ID NO: 20240 - protein, 60 aa, Artificial Sequence
  Synthetic
LEDIVREVLKRVKDLLERAEEENKKTLDDSRKSNEEVNREVEKVIRRIEELVKRLEEAAK

SEQ ID NO: 20241 - protein, 60 aa, Artificial Sequence
  Synthetic
DLVERLEELLKKIKRELEENIKRNRELLKKLEENLRRNEEKNRKLLEEIRKRLEDLLREK

SEQ ID NO: 20242 - protein, 62 aa, Artificial Sequence
  Synthetic
EEAEELVRRVEERMKEMVKRVHEVSEKNLRDIKKWLEDVNRISKETLDRLRELLKEAERRVR

SEQ ID NO: 20243 - protein, 60 aa, Artificial Sequence
  Synthetic
SLREELEELLKRIKERLKRLIEENRRLLEDLRRNLEENIRRNERTVEELKRDVKRLLDEK

SEQ ID NO: 20244 - protein, 60 aa, Artificial Sequence
  Synthetic
AEELVRRVKEEMERAVEEVKKTSEENLKAIKTWLEEVNRISEETLRRMREVLKELREDAK

SEQ ID NO: 20245 - protein, 60 aa, Artificial Sequence
  Synthetic
RLVEELEKLLKDSHDKDRKLIRENEELLKELKRNLDENIKTNEELVDRIRKRVEDLLREK

SEQ ID NO: 20246 - protein, 60 aa, Artificial Sequence
  Synthetic
AEDLVRRVEKEARDSSDESRRISEENLKEIKKWLDEVNEISKRTLEDAKRLLEDLERKAT

SEQ ID NO: 20247 - protein, 60 aa, Artificial Sequence
  Synthetic
DLEEELKTVLDRARKDVKRLKEELERILEEVKRMVEELDKRLEDLDEEVREKVKRLIDEK

SEQ ID NO: 20248 - protein, 59 aa, Artificial Sequence
  Synthetic
ERDVKRVLREAEELLKRVRDLVEKVLREIKRILEEVEELNRRIIRTSREILKRVEEEVK

SEQ ID NO: 20249 - protein, 60 aa, Artificial Sequence
  Synthetic
SLEERLDKVRRRVEEEIKRLEDRLEELDRRVAETVKRLDDEARKLDEELRERVKDIIRKK

SEQ ID NO: 20250 - protein, 59 aa, Artificial Sequence
  Synthetic
EEKVKRVIEEMEEIVKEVRKRVDEVIKTSEEILRRVRELNKEILKESEDLAEEVRKKAT

SEQ ID NO: 20251 - protein, 60 aa, Artificial Sequence
  Synthetic
KLEDELRKILEENRRIVKELEERMKRLDEAVRKAVEDLARSNEESNKRVKEVVDDLIRKK

SEQ ID NO: 20252 - protein, 59 aa, Artificial Sequence
  Synthetic
EEDVKKVLDDIKESSDRVRREIEEVLKESEERLRRVEKKNEDIDRRSEEILDDVRRKAK

SEQ ID NO: 20253 - protein, 60 aa, Artificial Sequence
  Synthetic
SLEEKARDVLRRSKELNDENRERAERMLDTNRRIADKLREEVERILREVEETVRRLIDEK

SEQ ID NO: 20254 - protein, 59 aa, Artificial Sequence
  Synthetic
EDVVERLLKEVEDSSRRVHKRSEELLRESREISERVRETVKKLLEDVERLLRKVTKEVK

SEQ ID NO: 20255 - protein, 60 aa, Artificial Sequence
  Synthetic
SLEDELREVLERSREKNERLRREAKKLLDTDRERVREILREAEKVLEEVKRTVEDLVREK

SEQ ID NO: 20256 - protein, 59 aa, Artificial Sequence
  Synthetic
EKVVEELLKRVEDSSKKVEDDVRRLLKEVEKISTELEELAKELVEEVRRIVKEVADRVK

SEQ ID NO: 20257 - protein, 60 aa, Artificial Sequence
  Synthetic
SLEERAEKILRDSKRTNEKNEEDVRRLLERNERRVRKIEEEAKKVLEDVRREVERLIREK

SEQ ID NO: 20258 - protein, 59 aa, Artificial Sequence
  Synthetic
EDVVRKLLDEVRESSERVHRKSEELLRRVEEISRTVEREVKKLLDRVRRVLEEAEKEVR

SEQ ID NO: 20259 - protein, 60 aa, Artificial Sequence
  Synthetic
DESRELVERVERVVRKVEKDHERLDRANKESTDRVREAVRRLDEENREVVRKVEDEVKKV

SEQ ID NO: 20260 - protein, 55 aa, Artificial Sequence
  Synthetic
KEAERLLDDVRRKLEELVRNAERSLEESRKTNEELEKRVRESLKEVERVLRELEK

SEQ ID NO: 20261 - protein, 60 aa, Artificial Sequence
  Synthetic
RETEEVIKTLEEVVKEVEERVRRLDEENKESTERVKKTVDDLDEENKRVVREVERRVKEV

SEQ ID NO: 20262 - protein, 55 aa, Artificial Sequence
  Synthetic
KRMEEVLKRVDERLKELERKVTDSLRRSREVNKRLRDKVEKSLREVEKVLEDLKR

SEQ ID NO: 20263 - protein, 60 aa, Artificial Sequence
  Synthetic
SLEERLREILKRNKEDVEDIRRRLEEILKRNKEEIDRLREELRRILEEVKREVKELIKRK

SEQ ID NO: 20264 - protein, 59 aa, Artificial Sequence
  Synthetic
EKTAEEVIERIKKLTEDVRRDVERVIREIEKSSDDLRKVVKDVIDDIKRLLKELREEIN

SEQ ID NO: 20265 - protein, 60 aa, Artificial Sequence
  Synthetic
SLEERLRKILTENERVIRKLERDLEENLERNKKTVKEIEDRLRKLDEDVERLVRELLRRK

SEQ ID NO: 20266 - protein, 59 aa, Artificial Sequence
  Synthetic
KDTAEEVIKEIEELTRRLEEEVRRVNERSDKSNEDVRRRVKEVEDESRDLARRLAERVN

SEQ ID NO: 20267 - protein, 60 aa, Artificial Sequence
  Synthetic
SLEERLRKILEKVKRTVDESRKRSKRLLEENRETMDRLREEAEEILERVKEKIKELVDRK

SEQ ID NO: 20268 - protein, 62 aa, Artificial Sequence
  Synthetic
EEAEKLVEEVIRDLDRVADELRELSKRLSDRSRESNERVRRTVKEVIKEIKRVLKELEEKVK

SEQ ID NO: 20269 - protein, 60 aa, Artificial Sequence
  Synthetic
DLRERMEKLLKEVKDEIDKSEKKSEDNLRTNKKDVDEIRKRLKRILDEVKEELRKLIDEK

SEQ ID NO: 20270 - protein, 60 aa, Artificial Sequence
  Synthetic
AEELVDRVAKRIRRVVEDVKRKSEDLNRKSNESNKRVRDLVERVKEEIDKVRDELRKSVK

SEQ ID NO: 20271 - protein, 60 aa, Artificial Sequence
  Synthetic
SEEERIRELLERVRRRLEESKKKSKDVADEVKETNDESRERSEKLLREVEERLRELLREL

SEQ ID NO: 20272 - protein, 56 aa, Artificial Sequence
  Synthetic
VEELRKEVEEVVERVRRISERLTEELRRSSERVKRISERLLEDLERVVRDVARRVK

SEQ ID NO: 20273 - protein, 60 aa, Artificial Sequence
  Synthetic
SEEERIRELLERVDRRLKESEKRSTDVARRVREENKELEKAARKILEDARRELEKLLREI

SEQ ID NO: 20274 - protein, 56 aa, Artificial Sequence
  Synthetic
VEELIKRVEDMVREVEKTSRKLIEELKRSSDEVRKMVEELLRRLERVLEEVKKRVK

SEQ ID NO: 20275 - protein, 58 aa, Artificial Sequence
  Synthetic
KDEETVTKLLEDVERKNRESEKDSRKIVEDVKDENRKLEDEARKSLEDSERKLERLER

SEQ ID NO: 20276 - protein, 56 aa, Artificial Sequence
  Synthetic
VRELAKRLRESTERVEEISRRLIKELEDSSDKVRKVVEDLLRENKEAVRRVAEEAT

SEQ ID NO: 20277 - protein, 60 aa, Artificial Sequence
  Synthetic
SELEKVEEDIRRLVERVKKIAEDVERLTRELVKEVRKSTEDSVRDIERLMKELREIARDV

SEQ ID NO: 20278 - protein, 59 aa, Artificial Sequence
  Synthetic
KDAKKRLEDLLDTLRKIVEDVSRRLKELNDRLRKLVEDSKRRNEELLRRLREIVKEIAK

SEQ ID NO: 20279 - protein, 60 aa, Artificial Sequence
  Synthetic
DSDKEVEKRIRELMKEVKDSTKESEDKIRESNERVKESSKRSEDEIRKLMEELDEIAKRV

SEQ ID NO: 20280 - protein, 59 aa, Artificial Sequence
  Synthetic
EDATRRLKKLLDDLKKEVDDSRRRNDELIKETERLIRESAKRNDKLLEDLKKRVDEIRK

SEQ ID NO: 20281 - protein, 60 aa, Artificial Sequence
  Synthetic
DEREEVEKRIRDLAEEVRRIVKRVEDETRRLVEEVKKSSDDSRRTIEKLARELKEITRRV

SEQ ID NO: 20282 - protein, 59 aa, Artificial Sequence
  Synthetic
KEAKDRLEDLLRRLREEVKRVKEKLKKLNDDLRREVEKSKEDNERLLKKLRDEVRKSAT

SEQ ID NO: 20283 - protein, 56 aa, Artificial Sequence
  Synthetic
DEVEKVLREIEKLIKEIREINKRINDRIEELIRRLRERVKKVSRESEELIRDLRRD

SEQ ID NO: 20284 - protein, 56 aa, Artificial Sequence
  Synthetic
ERKAREIIKRVEKVLEEVRRSLETSEKRVRDALREIEERLKENKRRVREVLEEIRK

SEQ ID NO: 20285 - protein, 61 aa, Artificial Sequence
  Synthetic
DEKEKLIKEVEDSTETVKRLVEELSRRSKKITEDVERLVKKLSDESKKILDEVRDLVRKRG

SEQ ID NO: 20286 - protein, 55 aa, Artificial Sequence
  Synthetic
EEADKLRKRSEDMVRRIEEHLKKNLKENKDALDKIRKELRENIETTKKTVDDIRK

SEQ ID NO: 20287 - protein, 61 aa, Artificial Sequence
  Synthetic
DEKDKLIEELDKILEDVRRRVEELSRRSKEITETVKELVKRLSDESERILREVDDVVRKRG

SEQ ID NO: 20288 - protein, 55 aa, Artificial Sequence
  Synthetic
EKAREVRRKVKETVERIEEELRRNIEENREMVERVEREARKNIKDTRKRVEEIRK

SEQ ID NO: 20289 - protein, 60 aa, Artificial Sequence
  Synthetic
RVEEKLEKIKRDIEKLVEDMKESNTRSKRKLEKLVEEMRRNNEELTRRVEELVKKIEDDV

SEQ ID NO: 20290 - protein, 59 aa, Artificial Sequence
  Synthetic
EDLVRRLLEEIRRILEEVRRTDKELLDENERILREVEKLNRDLVKEIEEILKKVEDDVR

SEQ ID NO: 20291 - protein, 58 aa, Artificial Sequence
  Synthetic
SEVEKAIEEIEKVIKEVRDKNRRVLEESKKLIRTVEETNKRNIEEIEKWIKTLDELTD

SEQ ID NO: 20292 - protein, 59 aa, Artificial Sequence
  Synthetic
EDAAKKAKEIIDKLRTLVEEVKRTNDKSLRDTREVVRRVEETLRRVEEKVKKRVDEIRK

SEQ ID NO: 20293 - protein, 58 aa, Artificial Sequence
  Synthetic
SEVEEVIRRIEEVLKELRRKNEEVLRESERANDEVRRVNEKNIRDIKKWLEDVKREVD

SEQ ID NO: 20294 - protein, 59 aa, Artificial Sequence
  Synthetic
EDARRRAEELERRVDKVVREVEKTNKESEEESKKLVDDVRRTLREITERVKDAVEKTLR

SEQ ID NO: 20295 - protein, 60 aa, Artificial Sequence
  Synthetic
SRDEEVARRVERVLEESEKLSKEVAEENEKVLREAREILEDVRKKVEDVARTLRELAKKV

SEQ ID NO: 20296 - protein, 59 aa, Artificial Sequence
  Synthetic
EEAKRRLEDLRRKLEELVKRNEKKLRDLDERLKELVERIERAAEKLLRDLRDLVRKITK

SEQ ID NO: 20297 - protein, 60 aa, Artificial Sequence
  Synthetic
RELEKVEKEVEDVLRDIERSSDEVRRENKRVAREMEESSRKVAEDVERVLRTLEELAKKV

SEQ ID NO: 20298 - protein, 59 aa, Artificial Sequence
  Synthetic
EEAKKRAEELVRRLEELLERNRETLERLDKELKDLVEKNKRTAEKLVKELEELVERIRK

SEQ ID NO: 20299 - protein, 60 aa, Artificial Sequence
  Synthetic
DELERVRREVKRLADESEKVSREVEERVRDTNRKSEEISRRVEKLARELLKKVEEVERRS

SEQ ID NO: 20300 - protein, 59 aa, Artificial Sequence
  Synthetic
EDLKRTLDELRKTIEKLVKDNRETLERLIRESEETIKRNREKLEELKRRLETLLRRVRK

SEQ ID NO: 20301 - protein, 60 aa, Artificial Sequence
  Synthetic
DELEDVRRRVDELVEELERVSRRVAELVKRIIDESRDISRRVARRVEELLRRLREVTKRS

SEQ ID NO: 20302 - protein, 59 aa, Artificial Sequence
  Synthetic
DELRKRLEDLKRKIERLLEDNRRKLEELIRRAEKVVEENERTMRKLKEDAKRLLEEIRK

SEQ ID NO: 20303 - protein, 59 aa, Artificial Sequence
  Synthetic
SVEDLVREVEERVRKVEKDLRELLDRLRRENEDAVRRSRESLRRNEEENKRVVDELRKD

SEQ ID NO: 20304 - protein, 55 aa, Artificial Sequence
  Synthetic
EEVVKKVREVLERVKETVKRVVDRNREVVKRLEDENRKVSEENKRVVEKVKEDAR

SEQ ID NO: 20305 - protein, 59 aa, Artificial Sequence
  Synthetic
SVEELVRRIAEKLRKVLDEIERLVDELRKENEEVVRDIERLVEDNEREVRDVLRKLEKD

SEQ ID NO: 20306 - protein, 55 aa, Artificial Sequence
  Synthetic
EDLVRDAERVLKRVTDEVRRVVKENKDVVRKVREEVERVSEENKRVLEKVTRDTK

SEQ ID NO: 20307 - protein, 60 aa, Artificial Sequence
  Synthetic
DEVETLKREVERLNKEVLDRVRKVIKEIKELDDRVRRENERVIREVERLIEEVRDRVRKN

SEQ ID NO: 20308 - protein, 59 aa, Artificial Sequence
  Synthetic
RRAEKIVKELREHSDEVVREMRELVERSKRHSTKVVEELKKSNKELEEKVRKVVRELEK

SEQ ID NO: 20309 - protein, 60 aa, Artificial Sequence
  Synthetic
SEVEELRERIKELNKRVLDTVRRVLERVKELNEEVDRRNKEVIKEVERLLEEVKREVTRE

SEQ ID NO: 20310 - protein, 59 aa, Artificial Sequence
  Synthetic
RRAEKIVDDIRRHSEDVVRRMRKLVEDSRRHSKRVVEEMERSNRELEERVKRVVEELKR

SEQ ID NO: 20311 - protein, 60 aa, Artificial Sequence
  Synthetic
SEVEELIKEIRRLNEEVRRRNKKVIEEVKKLNEDVKRKNDKVIEDVERLLREVKKRVEDE

SEQ ID NO: 20312 - protein, 59 aa, Artificial Sequence
  Synthetic
RRVEEIVRTIEKHSRDVVREMERSNDESEKHSRKVVREMEKSNKELKKKVEKIVRDLEK

SEQ ID NO: 20313 - protein, 60 aa, Artificial Sequence
  Synthetic
SEVEKLKREVERLNEEVLRRVRKVIEDSKRLNEEVRKRNEDVLKELKDLIREVKRRVEEE

SEQ ID NO: 20314 - protein, 59 aa, Artificial Sequence
  Synthetic
DRMRKIVEDLRRHSEEVVREAEDLVRRSEEDSRRVAREMEKSNEEIEKEARDVVRELER

SEQ ID NO: 20315 - protein, 60 aa, Artificial Sequence
  Synthetic
SEVERVVKEAEDLSRENNKRVKEVVRRAEDTNRRVEDENRKLLKEIKDLLREVKETVKRI

SEQ ID NO: 20316 - protein, 59 aa, Artificial Sequence
  Synthetic
ERVRRLLEEVLRRVAEDVRRSEEELDKVLRDSAESLKRSDKSLRDIVREVEKVLDEIRK

SEQ ID NO: 20317 - protein, 57 aa, Artificial Sequence
  Synthetic
SAEDLLRKLREDVERVMRELRKSNEESRKRVEEVVEEAERILKESRERSEELVRRLN

SEQ ID NO: 20318 - protein, 59 aa, Artificial Sequence
  Synthetic
EEVLRKLAEDVKRVLDKVKEENKRLLEENDRMLEEVRRLLKKLLEESEKVLEEVERKAR

SEQ ID NO: 20319 - protein, 59 aa, Artificial Sequence
  Synthetic
DLREEIRKLREDAKRVIDESRKSVKENEKRNKKLLDESEKSVRENEERNKELIKRVKDR

SEQ ID NO: 20320 - protein, 59 aa, Artificial Sequence
  Synthetic
REVLRKVKEELRRVLEKLRRLNEEASRENERILRELRKKNRDMNEDNRRILEELDEKAR

SEQ ID NO: 20321 - protein, 59 aa, Artificial Sequence
  Synthetic
DMEREVEKLERELRELIKRIRKIVDENRRRNEELLERSRESVRRNEEENRKLLEEVKKS

SEQ ID NO: 20322 - protein, 59 aa, Artificial Sequence
  Synthetic
EKVLREVKEEVRKLLEEIEKTVRDVSRENKRILDELRKKNKRADEENREILKKLREDVR

SEQ ID NO: 20323 - protein, 59 aa, Artificial Sequence
  Synthetic
SMEEEIRRLEEDVRRLVDKSRKSVKENEERNRKLLEESKESVRDNARRNEKLIRDVRRK

SEQ ID NO: 20324 - protein, 59 aa, Artificial Sequence
  Synthetic
REMLEEVLRRLEDALRRLEEENKRVSEDNERILEELRRKNEEADKRNRDILDDLRRRAD

SEQ ID NO: 20325 - protein, 59 aa, Artificial Sequence
  Synthetic
DMEDKVRKLERDVRELIKEVEKIVRDNADENRRVVEESEKSVRELADRARRLIDEIRKG

SEQ ID NO: 20326 - protein, 59 aa, Artificial Sequence
  Synthetic
EDVLREVKERVEEVLDRVRKKVEKVSRENKEIVKEVRKKNEDAVREAEELLKKIREEVR

SEQ ID NO: 20327 - protein, 60 aa, Artificial Sequence
  Synthetic
DEVEEVVRRIEELIKEVEDVDRDIERRVKELDEELRRVDDEIRRRAKKLLDDLEKRVREI

SEQ ID NO: 20328 - protein, 59 aa, Artificial Sequence
  Synthetic
ERVRRILTELRKRVEKVVRDSEKTLRESVERSARLLKESKESLEELERRAREVVERIKK

SEQ ID NO: 20329 - protein, 60 aa, Artificial Sequence
  Synthetic
DELEEAEKKVRDLIRRLREMNERALRESERLIRRLREVDEEIVRRIEDLLKKLREEVERE

SEQ ID NO: 20330 - protein, 59 aa, Artificial Sequence
  Synthetic
REVRKTLKDLEDTVKRVLEESEESARESEKRSRDVLRESERSLRELEKKVRKLLEEVKK

SEQ ID NO: 20331 - protein, 61 aa, Artificial Sequence
  Synthetic
SDVDKVAKEIDDALKDVRRKVDKVRKDNERVNREVEERVRRVTERNRDVIEEVKRRVEEVK

SEQ ID NO: 20332 - protein, 56 aa, Artificial Sequence
  Synthetic
SELVREIERRLEELVKELRKILDELRKRNEDTRRRLEEALKRNREEAERLEREIRK

SEQ ID NO: 20333 - protein, 60 aa, Artificial Sequence
  Synthetic
KDVDEIATELDEVIDRIRKKVKEVVERDEKVNRDVNDEVDKLTERNRRVLDKVLKDVTRR

SEQ ID NO: 20334 - protein, 56 aa, Artificial Sequence
  Synthetic
DRLVDELRKRVEDAKREIREILEKLKRDNDESKKRLERLLKENEDALREILERLRK

SEQ ID NO: 20335 - protein, 61 aa, Artificial Sequence
  Synthetic
DDVEKAVREVEEMLKRVDKEVERVSRENKRVSDEVRKKVKEVERKIKEVLDRIKDEVDRVK

SEQ ID NO: 20336 - protein, 56 aa, Artificial Sequence
  Synthetic
DELVKRLEDKMRRVKEKLKRLLEKNREDSERSERELREILKKITREVEELAKELEK

SEQ ID NO: 20337 - protein, 56 aa, Artificial Sequence
  Synthetic
EEVKKLLEEVRDLLRRVLEEVERSSDEDRKLNERVNEAIEKSIREVEELLRRIDRE

SEQ ID NO: 20338 - protein, 56 aa, Artificial Sequence
  Synthetic
EELVEELKRRVDEVKRRAEEINRENDERNKESKRRLEELNERLEERVRRLEEKLKK

SEQ ID NO: 20339 - protein, 57 aa, Artificial Sequence
  Synthetic
DEVEDLRRRVEKILEDVKRTVETASKRDRELNEEVNRLLRESVERVDRLLDRIRREA

SEQ ID NO: 20340 - protein, 56 aa, Artificial Sequence
  Synthetic
KEIVDRLRKAVEEVSREARKILDENRRRNEESEKRMREINKRLEDKVREVKKELEK

SEQ ID NO: 20341 - protein, 57 aa, Artificial Sequence
  Synthetic
REVDKLREDVRRLLEELLRALRESSKEDEKLNRKVNREVDRVLKEVDDLLEDIKKRV

SEQ ID NO: 20342 - protein, 56 aa, Artificial Sequence
  Synthetic
EEIVKRLEEEVREIVKEIKEINDKNRKKNEDSARKADEKVKELEERVRRVVKELRD

SEQ ID NO: 20343 - protein, 56 aa, Artificial Sequence
  Synthetic
KEVEDLVRRVEKLLRDIDRELKRSSDEDRELNERVNREVDRVLREVDRLLKEIRET

SEQ ID NO: 20344 - protein, 56 aa, Artificial Sequence
  Synthetic
ERIVRTLEKRIRDLVRKAEEIDRENEKRNKESSDRMERLVRELRKRVKRLVEELER

SEQ ID NO: 20345 - protein, 56 aa, Artificial Sequence
  Synthetic
DEMRRLLREVERILEEVERVLEKSVRDDERVNREVNRRLDEVLRRVEDLLRRIEKE

SEQ ID NO: 20346 - protein, 56 aa, Artificial Sequence
  Synthetic
ERLLERVRREVEKVRERADRIDKRLEDTNRRSKDRAEELVRELEKRVEDLKEKAEK

SEQ ID NO: 20347 - protein, 56 aa, Artificial Sequence
  Synthetic
DEVRKLEEEVDRILREVKEMVEDSIRRHKEVNDEIRRRVERVLEEVKTLLDLIREK

SEQ ID NO: 20348 - protein, 56 aa, Artificial Sequence
  Synthetic
KEIVDELRKRVEDVSREAKKLDDDLRENVKRLSEEMKKLVDDLRREVDRLEKERRK

SEQ ID NO: 20349 - protein, 57 aa, Artificial Sequence
  Synthetic
DEVEELRRKVEEILRRIREDVRKSIEDHRDVNRRVLEAVRRSTKRNKDVVDRLRDED

SEQ ID NO: 20350 - protein, 56 aa, Artificial Sequence
  Synthetic
ERIVKRLEDEVRKLVDEMRKLDEELTRNVDEVRREAERLDKENRDENRKLKEELKK

SEQ ID NO: 20351 - protein, 60 aa, Artificial Sequence
  Synthetic
SEMEKVVTDAKELLERLDRELERVIRESDKILDELRRKIEEVIKRSDELLEELDRRIKEN

SEQ ID NO: 20352 - protein, 56 aa, Artificial Sequence
  Synthetic
EELIERVRRLVEELIEKAKKLLEESERKSARLIEDLERLLEESRRKSDKLIKKARK

SEQ ID NO: 20353 - protein, 60 aa, Artificial Sequence
  Synthetic
DEVEEIRKEIEDILRRLRDLLRRVIEDSRRLLDELRERNERVIKESEDLLRDLEDKIRKR

SEQ ID NO: 20354 - protein, 56 aa, Artificial Sequence
  Synthetic
KEIVDRLRDEVRKLEEEAKELLRESNELTRELIDRLEKLNRDSNRKSRELIERLRK

SEQ ID NO: 20355 - protein, 60 aa, Artificial Sequence
  Synthetic
SELEEVEERIKKELDRLEKKMEESIKRDKEINRELNEMLKKSIKDSDDILRELRKEIEDD

SEQ ID NO: 20356 - protein, 59 aa, Artificial Sequence
  Synthetic
KRAEEIVKKLEKEVEDLVRKAKKLVDELRKENEESKKRARELLRRSEEKVKKLVREAEK

SEQ ID NO: 20357 - protein, 56 aa, Artificial Sequence
  Synthetic
DSEELVRTVKKELEDIIRESRKLVEDVARALEKIEKEIEEIVRTTDKELRKLIEEA

SEQ ID NO: 20358 - protein, 55 aa, Artificial Sequence
  Synthetic
EEVVKKVKDLLRELEKHNRTVLEEVKKALDELRRRLEEVHRRSKETLDRIRRDAT

SEQ ID NO: 20359 - protein, 56 aa, Artificial Sequence
  Synthetic
REDELVDTVRKRLKELIEESERLLEEVKKKLEEIKRRVEKILRETEKELRDIIRKN

SEQ ID NO: 20360 - protein, 55 aa, Artificial Sequence
  Synthetic
DKVLEKVRKVLEDLKRENKEVVERVDRVLEDAKRKLEKVHKDSRDALKKLDEDAK

SEQ ID NO: 20361 - protein, 56 aa, Artificial Sequence
  Synthetic
SEKELLDRVKEKLKKIIDDVEEILRRSKKELEKIIRESEKLVEEVKRDLRRLIEEN

SEQ ID NO: 20362 - protein, 55 aa, Artificial Sequence
  Synthetic
EKVVEEVERVLEKLLRDVERVHRRTKEVLDELRKENKKVVEDVRDVLEKARERAR

SEQ ID NO: 20363 - protein, 60 aa, Artificial Sequence
  Synthetic
EEVEDVARKIEKLLEDVRRIDKEISDRNRELLKEVRKIDEKILREIEKLLEELRDTATKD

SEQ ID NO: 20364 - protein, 55 aa, Artificial Sequence
  Synthetic
EEAERIKRELDRIRKESEETVKENEERLRRIKEESRRSVERARTELKRIEDEVRK

SEQ ID NO: 20365 - protein, 60 aa, Artificial Sequence
  Synthetic
KVEDELRKLREEVRRSKEEVEKKVKELDEEVKRSKRESEKKLRDLREEVKRLEDDAERSN

SEQ ID NO: 20366 - protein, 59 aa, Artificial Sequence
  Synthetic
EKFLEEVRERVRKLLDENHKILKEAERRVEELLRRNHKILKEALDRVRKLLKELRDRTR

SEQ ID NO: 20367 - protein, 60 aa, Artificial Sequence
  Synthetic
SIEEILRELREHVKENMERSEEIVRDLTRKVDESTRDSERILEKLKKDVDKLEEDAKRAN

SEQ ID NO: 20368 - protein, 62 aa, Artificial Sequence
  Synthetic
EEAEELLREVRERVERVSRRNEELLKRVERDVERVLRENHELLKRVAEEVERVLKEVRERTK

SEQ ID NO: 20369 - protein, 60 aa, Artificial Sequence
  Synthetic
SIEEILEKLRREVEESEKDSRRSAEELRKHVRENEKRSEDIVRKLTEDVERLERKARSRN

SEQ ID NO: 20370 - protein, 62 aa, Artificial Sequence
  Synthetic
EEAKELVREVAERVEDVLRKNHEINKTNAEAVKKWSEDNRKLLEDVRREVERVLKELEKEMT

SEQ ID NO: 20371 - protein, 59 aa, Artificial Sequence
  Synthetic
DEVRKLVEELRKINEDDKRRSDKNFDDNRKLAEDVKRVLERNVEENRKMAKRLEEVLRN

SEQ ID NO: 20372 - protein, 55 aa, Artificial Sequence
  Synthetic
EKLLKEAEERIRRNAEENRKLLERSKKALEEVERRARKLLEESRRALEELKKRAD

SEQ ID NO: 20373 - protein, 59 aa, Artificial Sequence
  Synthetic
DEVRELVKELRELNKRDKKRSKELRDKLEEANREDEEKTRKNKEDNERMAREVERVLRD

SEQ ID NO: 20374 - protein, 55 aa, Artificial Sequence
  Synthetic
ERLLKEAEELIRRNEEENRRILREVEERIKKNEDDNRRVLKRSREELERVEREAR

SEQ ID NO: 20375 - protein, 59 aa, Artificial Sequence
  Synthetic
DEVDKLRKELEDANARDREKSKENKDENDKALKELEEVLEKLKRELEEIVRRVKEVLDK

SEQ ID NO: 20376 - protein, 55 aa, Artificial Sequence
  Synthetic
EEILKKIEKEIRTNREENERLLKESEDELKRLEDEMREILERIKRLIEEVEERAR

SEQ ID NO: 20377 - protein, 59 aa, Artificial Sequence
  Synthetic
DEVRELVKELERINKEDRDKSRENFKRNADIAKEVEDNLERNEEENRKVEEEVRKVLRD

SEQ ID NO: 20378 - protein, 55 aa, Artificial Sequence
  Synthetic
EDLLRDAKRKIDENKEENERLLKESRKLLERVRKRAEELLRKSRKALEDLKEEAK

SEQ ID NO: 20379 - protein, 59 aa, Artificial Sequence
  Synthetic
SEVDKLEKEVRDANERDRRNSERNRKENEEMLRRVERVLRELKKKLEEAIRRARKVLDD

SEQ ID NO: 20380 - protein, 55 aa, Artificial Sequence
  Synthetic
ERILERIEELIRDNAKRNEDLLRRSKEMLDELRKKAKEILDRIRKLIKEVEDKAR

SEQ ID NO: 20381 - protein, 60 aa, Artificial Sequence
  Synthetic
DEVERVVEKLKTLIEEWKRLTEEIEKKNEELIRRIEKVLEDLFRENEKLARDIKREIDEL

SEQ ID NO: 20382 - protein, 55 aa, Artificial Sequence
  Synthetic
EELLRRIEEDIERLERTDREVLKRSEKKIRELRERAKELLKRSEEIIKKLEDEAR

SEQ ID NO: 20383 - protein, 60 aa, Artificial Sequence
  Synthetic
SKDDELKRKIDELIDRWRRLTEEIKKKNDELVKKWEKLTKEVTDHSRDLNRKIREELERL

SEQ ID NO: 20384 - protein, 55 aa, Artificial Sequence
  Synthetic
ERLLEEIEERIEKLERDDKKVLDDSRKKIDDLRKRDEEVIRRNRESIDRLRREAD

SEQ ID NO: 20385 - protein, 60 aa, Artificial Sequence
  Synthetic
DEVETVDDRVKKVIRKLEELLRELAKLNKDIVDDIRRRLKEVEERNRKLAEDIERLLEEG

SEQ ID NO: 20386 - protein, 55 aa, Artificial Sequence
  Synthetic
EDVIKKVRDEAERIRREVRRLDEESRKTVKRLLDEVRELNRRSEEELRELRRRIE

SEQ ID NO: 20387 - protein, 57 aa, Artificial Sequence
  Synthetic
SELEEVRERLRKLIEDLKRLNEESLKENREIIKALRELNERSLRENKELIKRLEDSN

SEQ ID NO: 20388 - protein, 58 aa, Artificial Sequence
  Synthetic
DEARTIIEEIKRRVDELRKHIEESIKEVKKLNDEVEKHIRESIKESEEDLKRLKDRID

SEQ ID NO: 20389 - protein, 60 aa, Artificial Sequence
  Synthetic
KDDEDVDEKIRRAIKKNEELSREIEDKIRRILKKHEDLTRDLAREIREVVRKLRELSKRG

SEQ ID NO: 20390 - protein, 55 aa, Artificial Sequence
  Synthetic
EELLRKVEELLRRLEEENRKILKEVDERLKDLEKKDRDLLEEAKKLLEDVERELR

SEQ ID NO: 20391 - protein, 60 aa, Artificial Sequence
  Synthetic
SELEKLIKELRDLVRESEERLRELVRKVKELIKRSEDEVERLLDRSRELAKELEEEIRRK

SEQ ID NO: 20392 - protein, 59 aa, Artificial Sequence
  Synthetic
REVLDKLKKDAKRVNDDSERIIKRADEEVKRVNEESKRMLEENEKMNRDLVRRIRERIK

SEQ ID NO: 20393 - protein, 56 aa, Artificial Sequence
  Synthetic
DLEEMLTEVERLARELEEESKKIRKEVERLARELEEESKEINKRIKDKADDLKEKL

SEQ ID NO: 20394 - protein, 59 aa, Artificial Sequence
  Synthetic
REIIKRLVDEVKKVIDELMKKNRKLLEDVERILTELSERNRDLARKVDKLIRDLEKRAR

SEQ ID NO: 20395 - protein, 60 aa, Artificial Sequence
  Synthetic
SKLEEVKERVKKLSKRNLDVAKRVLDEIDKLIKEDLKKTEDALRRIKELLDRLREMKRRG

SEQ ID NO: 20396 - protein, 59 aa, Artificial Sequence
  Synthetic
ERIRRIVKEVRELVRRNDEEVDKIVEEVKRLLERSSRENEKVVREVEELLKRLEEEARK

SEQ ID NO: 20397 - protein, 60 aa, Artificial Sequence
  Synthetic
DDVERLLKRVKELIDDDLRKTEKALREIEKLSRDNKKRTEDVLREIEERLRRLEEATRRG

SEQ ID NO: 20398 - protein, 59 aa, Artificial Sequence
  Synthetic
ERVRKIIRDVERLLEESTRRNEEAVKRVERLLEENKKRNEDVVREVEKELRRLREEARK

SEQ ID NO: 20399 - protein, 60 aa, Artificial Sequence
  Synthetic
SDIEKVLEDIRRLSKKNVDDSKRVLDEIRELSKRNLELVKEVLERIRRLLKKLEEARRRG

SEQ ID NO: 20400 - protein, 59 aa, Artificial Sequence
  Synthetic
ERIRKIVEDVKELLDRNREENERIVREVEKLLDENRKEVEKILREVERLLEELEKRERD

SEQ ID NO: 20401 - protein, 60 aa, Artificial Sequence
  Synthetic
KEVEDLLKRIRDLLKRVEETSREVLEEIKRLIDRDRKHSKEVLDEIKELLKRLIEAAKRG

SEQ ID NO: 20402 - protein, 59 aa, Artificial Sequence
  Synthetic
ERVRTIIREVEKLLKELEDKNDEIVRRVEELLRKSHEDNRRIAEEVREMLKRLEDEMRR

SEQ ID NO: 20403 - protein, 61 aa, Artificial Sequence
  Synthetic
SSLEKVEKDIRKLNDDSKKEAKRVTEENRKSNEDVERELRKIVEEVRRLIKDVEDKIRKDG

SEQ ID NO: 20404 - protein, 59 aa, Artificial Sequence
  Synthetic
ERVKRIVDELRKSLRKLEEDVKELIKENKESNDRLRERVERILKELRELLRELEEKVKT

SEQ ID NO: 20405 - protein, 61 aa, Artificial Sequence
  Synthetic
SEVERLVEEVRKSNKKWEEESRELTERNKKLNRETTKRAEDLLERVRELVRTVTEIIKREG

SEQ ID NO: 20406 - protein, 59 aa, Artificial Sequence
  Synthetic
ERLKRIVEEIRDSVRRLKEKSEELVRRNEESNDRLRRRVEEIAKEARDLVRRLEEEVRR

SEQ ID NO: 20407 - protein, 61 aa, Artificial Sequence
  Synthetic
SEAERVLEEVRRLNDKSKKTAEKLTEENKRLNKRTTDFLKEVLERIEELVRRVEDRIRKEG

SEQ ID NO: 20408 - protein, 59 aa, Artificial Sequence
  Synthetic
KRVKDIVREIRDSVRKLEEEVRKLIRENEKSNKDLRRRVRKIEEDIKRIIRELEERVRK

SEQ ID NO: 20409 - protein, 61 aa, Artificial Sequence
  Synthetic
SELEKILKDIEDLVRKWLEESKDLLRKLKKLNEDTTERLRRLLDELRKLIKDLLDKIRKDG

SEQ ID NO: 20410 - protein, 59 aa, Artificial Sequence
  Synthetic
KRVKDIVKKIEELVKKAKEESKKIVEEVRRSVKRLEEEVRKIEKDIKDLIDELRKKVTT

SEQ ID NO: 20411 - protein, 59 aa, Artificial Sequence
  Synthetic
SEVEDLRRELEEINKEWNKRTKDLVKEVEEVNRDINKKIRDLLREARRLVDEIRRLIEK

SEQ ID NO: 20412 - protein, 56 aa, Artificial Sequence
  Synthetic
EEVIKELRKLLEESERRAREMNKRLDRLLEESKKDVDRVREEIKRLVDEIEDRARK

SEQ ID NO: 20413 - protein, 59 aa, Artificial Sequence
  Synthetic
DEIEEVLKRLEEIVKTWDERTKRLTERVRTVNREVNERHKKLTRDLRELAREVLDLVRQ

SEQ ID NO: 20414 - protein, 56 aa, Artificial Sequence
  Synthetic
REMLRELEERIRTVEDKVRRVNEELRELLKTSNRRSEEIEKELEKILREIRERARK

SEQ ID NO: 20415 - protein, 59 aa, Artificial Sequence
  Synthetic
DEVRKVLEDLRKIVREWEERTERLLRDLKRINEEINRRVEKLTEELRRLVKEIKKLTDD

SEQ ID NO: 20416 - protein, 56 aa, Artificial Sequence
  Synthetic
EDVLREADKIIEDVEREARRVNKELKDLLDESAERIERIIREIERLVEKIKRDADR

SEQ ID NO: 20417 - protein, 59 aa, Artificial Sequence
  Synthetic
SEIEKVLDELREINRRINETAKEILRRLKEINERTKKEIDRLLDELRKLLRRVEELRKE

SEQ ID NO: 20418 - protein, 56 aa, Artificial Sequence
  Synthetic
EEALKDLERLLRESEKRIREIIKRIRESVEKLERDVRRVIDEIRRRLEEIERRLRK

SEQ ID NO: 20419 - protein, 55 aa, Artificial Sequence
  Synthetic
KEVEEALEELRRILREWEEVTKRLEERVEEINRRSLEELRRLKEEVEEIAKRIRD

SEQ ID NO: 20420 - protein, 56 aa, Artificial Sequence
  Synthetic
KEVLEELDKLVKDIKRKVDEVNEKWKESSKRLEDEHRKVIKELEELVKRVEEELRR

SEQ ID NO: 20421 - protein, 55 aa, Artificial Sequence
  Synthetic
KEVEDALKKAEDILRRWEEVTKKLKDEARKINEDSRRKLKRLKEESREIVERIKK

SEQ ID NO: 20422 - protein, 56 aa, Artificial Sequence
  Synthetic
EEVLRRLEKLVEDIKRKVAKVNDEWRKSSEDLEREHRKVHRESEKLIRDVEDRLRK

SEQ ID NO: 20423 - protein, 55 aa, Artificial Sequence
  Synthetic
SEVEEVRREVKRVVDDWRRVTKKLLDDIRRISEESKKIIRDLKEAAKTMIREVER

SEQ ID NO: 20424 - protein, 56 aa, Artificial Sequence
  Synthetic
EEVLKELEKLLEDLRREVEEVNERLKRLLDENEKRIREVLRELKKLLRDLDEKLRR

SEQ ID NO: 20425 - protein, 60 aa, Artificial Sequence
  Synthetic
DELERVREEVKKLSDTSREKLERALKKARDLLEENERRLRELKKEVEELIRRIEEKLKDR

SEQ ID NO: 20426 - protein, 59 aa, Artificial Sequence
  Synthetic
EELRKVLTDIERLLRENKKELDEVLKEVEKLSREADDKNRKVLKEIKELLDELKKRAKD

SEQ ID NO: 20427 - protein, 60 aa, Artificial Sequence
  Synthetic
SEVERMLEEVERISEESKRKLEEVLRRVEEIIKAIERTLEKVLKDDEEIIRRIEDTLRRR

SEQ ID NO: 20428 - protein, 56 aa, Artificial Sequence
  Synthetic
REVVKTIDDLLRENERRVDEALEEIEKRARDLREKVKELEERLDRTNRKLKKKVED

SEQ ID NO: 20429 - protein, 57 aa, Artificial Sequence
  Synthetic
KEVEDIIEESRKLDKELEDEIRRIIEESRRLNEELEEIARRIDEEIKELLERLKRRD

SEQ ID NO: 20430 - protein, 59 aa, Artificial Sequence
  Synthetic
KEDVERLVRSNREVARDVREKLKRLLEHNKEVVDRVREELKRLLDEARRVIEEVRKKAD

SEQ ID NO: 20431 - protein, 60 aa, Artificial Sequence
  Synthetic
DELERIDEKIKRDVEEHKRETKRILDESERLNREVKKRLEEIRERIRRLAEEIRKEIERD

SEQ ID NO: 20432 - protein, 59 aa, Artificial Sequence
  Synthetic
ERKLEKVMEDVKRLIDEARKENEDVARRMERSNKELKRKLDEIRREVEELIKELRERTK

SEQ ID NO: 20433 - protein, 60 aa, Artificial Sequence
  Synthetic
DDLERAREEVADLIRKHEEKTRRILEESRRLNERHRELSKRILDEIRKLAERIEELIKRE

SEQ ID NO: 20434 - protein, 59 aa, Artificial Sequence
  Synthetic
KEELDRIEEELKRLIDTLREKNREVEKRARDSNRDLKRTNDEIAKEVRELIKKLREDLK

SEQ ID NO: 20435 - protein, 60 aa, Artificial Sequence
  Synthetic
RELETIADRIRKLSRENSEVLKEIARRIERLVEEHRKESERILKEIKELADDITRLIRED

SEQ ID NO: 20436 - protein, 59 aa, Artificial Sequence
  Synthetic
KEELDKVEEEVRRLIRTNREILRTIEKRVRDLIEELKRRNDEIARRVEELIKRLRRETD

SEQ ID NO: 20437 - protein, 60 aa, Artificial Sequence
  Synthetic
SELEKVADELRKLIKDDNDLLDEILDRIRKLSKENEKRLREILKEIRKLMDEISKLIKKD

SEQ ID NO: 20438 - protein, 59 aa, Artificial Sequence
  Synthetic
KEELDKIREELERLIKRNKEKLDEIRREVDELIKKNEETLKRIEEEVRKLIEDLKEELR

SEQ ID NO: 20439 - protein, 60 aa, Artificial Sequence
  Synthetic
SDLEKIEKEIEDLVKRDNEVDKKVMREIRELSKENKERLRKILEDLRREAKKIKDDIERE

SEQ ID NO: 20440 - protein, 59 aa, Artificial Sequence
  Synthetic
KEKLKRVEKKVRELIKRNRDHNERTREDVEKLIRDNEDTLRRIEEEIERLIEKLKRDTK

SEQ ID NO: 20441 - protein, 57 aa, Artificial Sequence
  Synthetic
KEVEDAVKELEDLLRKNEDKTRKIVEDMRRSNKDLEDHSRKSEEEVRKLLDDLRRAG

SEQ ID NO: 20442 - protein, 56 aa, Artificial Sequence
  Synthetic
IKTLLDRVRKLAEEDNERLDRLRRESEELNERVRRVDKKLLEEIRRKAKKVEDDTR

SEQ ID NO: 20443 - protein, 57 aa, Artificial Sequence
  Synthetic
DEVREVDRRLKELLRRLKETIDEIRRRMEESNRRLEDHSRKSEEEARKLLEELERKG

SEQ ID NO: 20444 - protein, 56 aa, Artificial Sequence
  Synthetic
LEELLRRLEELAERAERKLEKALRDSEDLNRKVTEVDRRLLKEIRDLVEKVERERR

SEQ ID NO: 20445 - protein, 57 aa, Artificial Sequence
  Synthetic
SEDEKVRKEAEDLLRELEKHSRDTERRARKSNRDNNEHSKESVKDLRRLLERLRKAG

SEQ ID NO: 20446 - protein, 56 aa, Artificial Sequence
  Synthetic
IRKLLEEVRKLVDDLRKRDEEIMKTSERLNEEDNRKDRRLVEDVKRLADEVEKKTR

SEQ ID NO: 20447 - protein, 57 aa, Artificial Sequence
  Synthetic
SKVDDVKRRIRKLLEDSKKRSRESIERVERSNRRLEKHSRDSARRAKELLDKLREEG

SEQ ID NO: 20448 - protein, 56 aa, Artificial Sequence
  Synthetic
IDELLERLKELAKRIKELDDRLLRELEEINKTTEKLDRDLLKEIKERIDELRKREK

SEQ ID NO: 20449 - protein, 57 aa, Artificial Sequence
  Synthetic
DKVERVKKEVRDLLRRLEKHSEDSVREIDTSNKRLEEHSRRSKEELKRLLRKLKEAG

SEQ ID NO: 20450 - protein, 56 aa, Artificial Sequence
  Synthetic
IDRVLEEVRKIIRRIEEEDRRLLKEIRDINETTERLDRKLLDELRKVVKDIEDRER

SEQ ID NO: 20451 - protein, 60 aa, Artificial Sequence
  Synthetic
SELEEVKKKVEKLIRDVEKVSEDTRREVERLIREVEEATKEHLDRVRRLIEELREVRKAG

SEQ ID NO: 20452 - protein, 62 aa, Artificial Sequence
  Synthetic
DRLRERLERLAKEIEDLLRRLREISRTIEERARRLLEELKKRSEDLRKTAEELLKEIDEELK

SEQ ID NO: 20453 - protein, 57 aa, Artificial Sequence
  Synthetic
DEVETIKKKAEDLLRDSKRKTDELTKRMEELLERSKEDSERLIRRLRELLERLRRRG

SEQ ID NO: 20454 - protein, 56 aa, Artificial Sequence
  Synthetic
EEDVDREVKRLVDESKKIIERVEEDVKRLIRESEKKSRDVERRVEELERKAREDER

SEQ ID NO: 20455 - protein, 56 aa, Artificial Sequence
  Synthetic
SEVEKIKREMEKLLEEHKKLVDDIRREAERLHEEHRRLSDKIREDLKRLLEELRRS

SEQ ID NO: 20456 - protein, 59 aa, Artificial Sequence
  Synthetic
RKELDRLRREVEKVVRELKERNKELLKRLEEAVEELKRRNRKLLEDARRVVEEIKERAR

SEQ ID NO: 20457 - protein, 56 aa, Artificial Sequence
  Synthetic
STVERIDEELKRLHTEHKKLSDDIKREAERLHEEHRRLSEEIRERLERLLEELRRR

SEQ ID NO: 20458 - protein, 59 aa, Artificial Sequence
  Synthetic
EEDLDKILRDLERTAKELKDRNRRLLEEVERVVRELKRRNKELLKTVERVAREIERRAE

SEQ ID NO: 20459 - protein, 56 aa, Artificial Sequence
  Synthetic
REVEEIDKELRRLHEEHRRLVEDIRRKLKKLHDEHRRLSEEIKRRLEELIRKLRED

SEQ ID NO: 20460 - protein, 59 aa, Artificial Sequence
  Synthetic
REELTKLLEEVKRVVDRLKEENKRLLKEVKEVAERLKRENERLLEELRRVAEEVRERTR

SEQ ID NO: 20461 - protein, 56 aa, Artificial Sequence
  Synthetic
KEVEEIREEAKRLHEEHRRLSKRIDDELKRLHDEHKRLSDEIRKELERLIEELKKG

SEQ ID NO: 20462 - protein, 59 aa, Artificial Sequence
  Synthetic
RDKARKLLEEVRRMVKRLKEENKRLLEEVRKVVEDLKRRNKELLEKLKREAERVKEEAK

SEQ ID NO: 20463 - protein, 56 aa, Artificial Sequence
  Synthetic
SEVDEIRKRLEDLHREHRELSREIEERLKKLHDEHRRLVEEIIRRARELLEDLRRE

SEQ ID NO: 20464 - protein, 59 aa, Artificial Sequence
  Synthetic
RDKVERLLREVKKVVDKLKKDNEKLLRDLKRVVDELKEKNKRLLEEVKRVVDDIRRRAK

SEQ ID NO: 20465 - protein, 60 aa, Artificial Sequence
  Synthetic
DEVREVERKIDKLAKDLKDELRRLLKEYEELVERLEELLERILRESEKLAEELKEELKRR

SEQ ID NO: 20466 - protein, 55 aa, Artificial Sequence
  Synthetic
DKVRKRIEELVKELKDILEEIKRRVEELDERSKRILKEIADRNRKLVDELRKTLE

SEQ ID NO: 20467 - protein, 60 aa, Artificial Sequence
  Synthetic
SEVEKALEDVRRLVEELKKELKEILERYKRLVDKLKKENREDHERSKELAERLKDLLRKS

SEQ ID NO: 20468 - protein, 55 aa, Artificial Sequence
  Synthetic
EKVRDTLRKLLEELDDLVRRIKTTLRKLVEESRRSLRKNEEDNRKLVEELREEAR

SEQ ID NO: 20469 - protein, 60 aa, Artificial Sequence
  Synthetic
DEVREVLREAREVVKRLKDRLRRILEESRRVVDELRDKNRKDHETYRKVVEELKKRLEER

SEQ ID NO: 20470 - protein, 55 aa, Artificial Sequence
  Synthetic
EEVRKDIERLFKELEDILKEIKEDNRRLVEDIKRSLEKNKRDLEKLVKESEDEER

SEQ ID NO: 20471 - protein, 60 aa, Artificial Sequence
  Synthetic
DEVRKVLEDARRLVEKLERDLEKVLEDYKRLVDELKERNERSHRESRRLAEELKKELERE

SEQ ID NO: 20472 - protein, 55 aa, Artificial Sequence
  Synthetic
DEVKERIDRLVKRLEDLARRIKEELDKLVKESRESLERNKTEVKKLIRELEETVR

SEQ ID NO: 20473 - protein, 60 aa, Artificial Sequence
  Synthetic
SEVEDVLTKIEDVVRKLEEENKRSHDESRKLADELKKENKEDHDRYRKEVERLKKELEER

SEQ ID NO: 20474 - protein, 55 aa, Artificial Sequence
  Synthetic
DKVRKRVEELVKEIEKSARDNEEAVKRLAEELRDSARRNKEELEKLVKESDDELK

SEQ ID NO: 20475 - protein, 56 aa, Artificial Sequence
  Synthetic
RETEEIEKEIRRLVKELRELNDEVEDRVRKLIKELKELNDRSERTLRELADELRRS

SEQ ID NO: 20476 - protein, 59 aa, Artificial Sequence
  Synthetic
DDVVRKVLERAERLVREDKKHTKEVLERIKELVDRDKKHTRDVNEEVKRLVEEIKKKTK

SEQ ID NO: 20477 - protein, 56 aa, Artificial Sequence
  Synthetic
SEIEEIEKRIEDLARELKELNKEVEERVKKLIEDLRRLNEESRESTDRLMDELRKA

SEQ ID NO: 20478 - protein, 59 aa, Artificial Sequence
  Synthetic
DEVVRRVLEEIERLVRRDKEHTERVLRTIEKLVREDEEHTKRVNEEIRKLAKEIEERAR

SEQ ID NO: 20479 - protein, 56 aa, Artificial Sequence
  Synthetic
REIEELRKEIETLIRENEELNRRSKETSEELIRRLKKLNRDVEEEVRRLVKDLRDR

SEQ ID NO: 20480 - protein, 59 aa, Artificial Sequence
  Synthetic
DEVVRRVAEEARRLSKRNKDAIREVNETSRRLATRDAKHTRDVLREIKRLADEIRERTR

SEQ ID NO: 20481 - protein, 56 aa, Artificial Sequence
  Synthetic
SEIEKAEEDVKRLIKENEELNRRSEETSRKLVEENERLNKEVEDRVRKLIKELEDN

SEQ ID NO: 20482 - protein, 59 aa, Artificial Sequence
  Synthetic
DDVVRRILKRIEDLSRKNKRDIEEVNKESERLSRENKKKIKDVLEEIRRLVERIEREVR

SEQ ID NO: 20483 - protein, 60 aa, Artificial Sequence
  Synthetic
SEIEKVLEDLRRLADRHRKRVEEILREAEDSNRKTKKKHREVEKEVKELADKLKDEIRRD

SEQ ID NO: 20484 - protein, 58 aa, Artificial Sequence
  Synthetic
RRLDEVEKDLRRLIRELKRLNEEVEKRVRDLIKENEELNKRIHDDLRRLIKELEDETR

SEQ ID NO: 20485 - protein, 60 aa, Artificial Sequence
  Synthetic
SDIEKVLDDLRKLAEEIERAHEEVAREVRELSKRNKEVIKDILRRAKELAERIKELIDRS

SEQ ID NO: 20486 - protein, 58 aa, Artificial Sequence
  Synthetic
DDLRKVEETLRELIRKIRKKNEEIRRDLRRLIEENKELLERVRREVERLIEDIKRKLK

SEQ ID NO: 20487 - protein, 60 aa, Artificial Sequence
  Synthetic
SEIEKMLEELRRLSERNKRTTEEIEKRLRDSNRDTKRKHEEALRTIKELIDRIKRAIREE

SEQ ID NO: 20488 - protein, 58 aa, Artificial Sequence
  Synthetic
DKLRKAADDVRRLIEENRRLDERLHEEVKKLIEENRKLNEDINERVRRLIEELRRETK

SEQ ID NO: 20489 - protein, 60 aa, Artificial Sequence
  Synthetic
EEIERALREMRELSRTHKELVEKILRDIAELAKTHERINEDILRKIKKLIDEIADEIRKE

SEQ ID NO: 20490 - protein, 58 aa, Artificial Sequence
  Synthetic
RELDEIAKDVKRLIDENRELLKRVEDEVRRLIRKLEELNRRTEEEVKKLIKKLEDDLK

SEQ ID NO: 20491 - protein, 57 aa, Artificial Sequence
  Synthetic
RELEELEKELRELLRELRRLSEESRKELKKLLDELEELSRRSAKKLKDLLDDLRRRG

SEQ ID NO: 20492 - protein, 56 aa, Artificial Sequence
  Synthetic
IDEVRERLRELIERDKKLNKKLTDDLRRLAERDKRENEKLSKELEDLARKLREDAR

SEQ ID NO: 20493 - protein, 57 aa, Artificial Sequence
  Synthetic
SEIEELEKRIDELLKELRDLSRRIAEEVKRLLEELKKLSKDSEDKLRELLERLKRKG

SEQ ID NO: 20494 - protein, 56 aa, Artificial Sequence
  Synthetic
VEEVLRRLEKLVREDKERLKKVLKDARDLIKKDKDLNEKLSRELEKLVRELEERAR

SEQ ID NO: 20495 - protein, 57 aa, Artificial Sequence
  Synthetic
SEIEDLERRIRKLLEENRKLVDDVAKKLRELLRELRKLSEESRKRLEDLLRKLRKDG

SEQ ID NO: 20496 - protein, 56 aa, Artificial Sequence
  Synthetic
VEEVLRRLEKLSRENKDLIRRIDERIEKLIRDDKRRNREISERARELARKLEDEAR

SEQ ID NO: 20497 - protein, 57 aa, Artificial Sequence
  Synthetic
KESEELEKEIRRLLRELREISRKIEEDARRLIEELRRLTEESERELEELLEKLKRDG

SEQ ID NO: 20498 - protein, 56 aa, Artificial Sequence
  Synthetic
VREVLERLKKLVEEDKRRLKELLDRIRELMERDKRKNKEISERVRKLIKELEDKAR

SEQ ID NO: 20499 - protein, 56 aa, Artificial Sequence
  Synthetic
DEEDRLREELRRLLEELRELSERSRDEVKKLLEDLERLTRESEEKVRRLLEKLKRD

SEQ ID NO: 20500 - protein, 56 aa, Artificial Sequence
  Synthetic
VKRVLEELRRLVEEDKKLNEEITEDARRLIEEDRRLNKKISDEAEKLARELRERAR

SEQ ID NO: 20501 - protein, 57 aa, Artificial Sequence
  Synthetic
DELRDVKRELDRLLRENEEIVERIAETVRRLLEELKKLTKELAEELRKLLEELRKRG

SEQ ID NO: 20502 - protein, 56 aa, Artificial Sequence
  Synthetic
VETVLRRVRELSRDNKRRMRRVLEEAKRLAKEDKERIDKIRKEIEELIKRLKDKAT

SEQ ID NO: 20503 - protein, 56 aa, Artificial Sequence
  Synthetic
DEEEDLERRIKKLLDENRELLKRIAEELRRLLEELRRLTEESADRLRRLLKELKDR

SEQ ID NO: 20504 - protein, 56 aa, Artificial Sequence
  Synthetic
IETLLRELEKLSRDNKELLKKIEKEIRDLIKEDKERNRELSERLRKLVEELKKKAT

SEQ ID NO: 20505 - protein, 57 aa, Artificial Sequence
  Synthetic
REIEEAAKDLDRLLEENKKLVKEVEEELRRLLKENRDLVKESEDRIRKLLEELRRRG

SEQ ID NO: 20506 - protein, 56 aa, Artificial Sequence
  Synthetic
VEEVLRRVRKLSRENKEKIRKILEDVKKLSEDNKRRNEELSRRVKTLVDEIKKRAT

SEQ ID NO: 20507 - protein, 57 aa, Artificial Sequence
  Synthetic
SRIEELEKRIRELLKENRDLVKESEDRVEELLRRNEELVRRSKEKVERLLEELRRKG

SEQ ID NO: 20508 - protein, 56 aa, Artificial Sequence
  Synthetic
VDEVLRRLKKLSDDNKELNERLTRTLEELSRRNADINKKLSDEAEKLIRDLEKRAT

SEQ ID NO: 20509 - protein, 57 aa, Artificial Sequence
  Synthetic
KEIEDAERELRRLLEELKRLLDDVAREVKRLLDENKRLVEKSEEDVKRLLDELREEG

SEQ ID NO: 20510 - protein, 56 aa, Artificial Sequence
  Synthetic
VEEVLRRVRETVERVKKKIKDVLKEIEDLSRENKKLNRDLSERLKKLADDLREKAR

SEQ ID NO: 20511 - protein, 56 aa, Artificial Sequence
  Synthetic
DELEELSREIKKLLEENRRLVRESEEDLRRLNEENRKLVEDSERRVRELLKDLRDR

SEQ ID NO: 20512 - protein, 56 aa, Artificial Sequence
  Synthetic
IEEVRERLRKLSKENKDLNRELTKRSRELNARTKERNEEISRRAEELARKIREDAR

SEQ ID NO: 20513 - protein, 56 aa, Artificial Sequence
  Synthetic
DEKETLARKLDELLRELEKLVRDSAREVEKLNEENRRRLEESRDRLRKLLEKLKRD

SEQ ID NO: 20514 - protein, 56 aa, Artificial Sequence
  Synthetic
IERVDRELKRLAEEIKELNKRITDESRKLNEDTKRVNDKLSRDLEELARDLERRAT

SEQ ID NO: 20515 - protein, 57 aa, Artificial Sequence
  Synthetic
SEIERIERENDRLNEENKKITEDIERELKRLLEENRELSRTIEEELERLLRELRKRN

SEQ ID NO: 20516 - protein, 59 aa, Artificial Sequence
  Synthetic
EKTLRELLKRSEELSKENKDRLKKLLDDLREVSKKNKEDLKRLLREVREVARKVKERAN

SEQ ID NO: 20517 - protein, 57 aa, Artificial Sequence
  Synthetic
DDIERILREMERLLEENKEISDEIRKELKRLLDENRKLSEDVVKALEDLLRDLERRK

SEQ ID NO: 20518 - protein, 59 aa, Artificial Sequence
  Synthetic
KDTLRELARKIRKLSEENKERLKELLRELKKLSDENKERIKKLLKDAEKIIEDVRRRAK

SEQ ID NO: 20519 - protein, 57 aa, Artificial Sequence
  Synthetic
SEIERIDEDNKRLNDENRKLSDRVRRENERLNKENRELSKRVEETLKRLLDELRRRG

SEQ ID NO: 20520 - protein, 59 aa, Artificial Sequence
  Synthetic
KRTLTELLKESRELSKRNKDKIRELLRRSEKLSRENKKRIEDLLRELRRVVEKIKREAD

SEQ ID NO: 20521 - protein, 57 aa, Artificial Sequence
  Synthetic
KEIEDLRRDLDRLLRENRELTREVKEELEKLNRELEELVRRIKRTLDELLKDLERRN

SEQ ID NO: 20522 - protein, 59 aa, Artificial Sequence
  Synthetic
REEIERLREELRKLSEDNKDRIRRILERLRKTVEEIKKRLEDILRRLTEIAKEIEERAR

SEQ ID NO: 20523 - protein, 59 aa, Artificial Sequence
  Synthetic
SELEKLLEDLRRLSERSERELRRLRKELEEIIREIKKKMEENLERNRKVIDEIDKVIKD

SEQ ID NO: 20524 - protein, 58 aa, Artificial Sequence
  Synthetic
EEAKRLKEDAERLLRENERRIDELRKEADELIKELKKRIEDLVKESRRLLEELDRRAK

SEQ ID NO: 20525 - protein, 59 aa, Artificial Sequence
  Synthetic
EELERLEERLDRLIEEAERRLKDNLKKNEDMARKWEEDTKRNEKRNRDLIRRIRKVIKD

SEQ ID NO: 20526 - protein, 58 aa, Artificial Sequence
  Synthetic
RKVKELKRRARELLERLARLIDELRRRSEDLIRRLAEKSERLERESRKLLRDIAEKTT

SEQ ID NO: 20527 - protein, 60 aa, Artificial Sequence
  Synthetic
RELEELKKEAEKVSKESKDLIEKVIRDNEDVSRRSEELIRELMREVKEVIDRLRELIERR

SEQ ID NO: 20528 - protein, 59 aa, Artificial Sequence
  Synthetic
EDKVRRIKEELERLIEENEKLLEESKKRSEDNARRNEELLERLRRELERLARELEEELR

SEQ ID NO: 20529 - protein, 57 aa, Artificial Sequence
  Synthetic
REKEELKKDIERMVEELKKLNKESRDRTRKLIKELEDLVKESDDDTERLARKLEKEV

SEQ ID NO: 20530 - protein, 56 aa, Artificial Sequence
  Synthetic
VEDLLREARKLIEELKRHTEEVIKRNKKLIDELKEIIEDVIRRNRKLVKELEDTAK

SEQ ID NO: 20531 - protein, 57 aa, Artificial Sequence
  Synthetic
SEKEDLKRRLDKLAEDLRRLNKEVDDEVKELARRLRKLNKDSRKRTEDLIRELEKRV

SEQ ID NO: 20532 - protein, 56 aa, Artificial Sequence
  Synthetic
VDELREEIKELIDRLRKHTEEIIRRIRRLFEELRKHSKKVIDDNKRLFDELEKTAR

SEQ ID NO: 20533 - protein, 57 aa, Artificial Sequence
  Synthetic
KEKEDLKRKVDELDKELKKLNEDSRRKTKELIKRLKDINKRLREELEKLADELRKKV

SEQ ID NO: 20534 - protein, 56 aa, Artificial Sequence
  Synthetic
VEELDREITELIKELRRHTEEVIRRNEKLARELEKHSRDIMETIRELIRDLERTAK

SEQ ID NO: 20535 - protein, 57 aa, Artificial Sequence
  Synthetic
SEKERLEKRLREVVRELEKLNEDLDRRLEELARDLERLNEESRRESRKLAEDLKREV

SEQ ID NO: 20536 - protein, 56 aa, Artificial Sequence
  Synthetic
VEEVEERIERLIRDLKRHTEEIKKTIEELMKELREHSREIIKRSRDLFKELKDTTK

SEQ ID NO: 20537 - protein, 60 aa, Artificial Sequence
  Synthetic
SELEKVIEEIREISERSLEKIKRLMEKIKELSDRTAERLRRVLEEIRKIIEEIKELRDRG

SEQ ID NO: 20538 - protein, 59 aa, Artificial Sequence
  Synthetic
KELAKKITEDLKRNEERNRRAIEELERTLRKLEEENRRLIREAEDTLRRLVEELEKKDE

SEQ ID NO: 20539 - protein, 59 aa, Artificial Sequence
  Synthetic
SELEEVLKEAKRLIDEIRKHTRDVSERSKRLLEEDLKHTEEVIKEIRKLIKEILDRIRA

SEQ ID NO: 20540 - protein, 59 aa, Artificial Sequence
  Synthetic
EDDLRRLKETIERLAKDLERLNREHDETNKKLAKDSEDLNRELKKRVEELEEELRRALK

SEQ ID NO: 20541 - protein, 59 aa, Artificial Sequence
  Synthetic
KELEDVLKEIRDLARRIEEHSKKVLREIEELIRRLEEENREVLRRMREEIKKIKEDIRN

SEQ ID NO: 20542 - protein, 59 aa, Artificial Sequence
  Synthetic
KRKLDELRRDVRRLERRLERLNETLKERIDRLAERLEEVDRRLDEELKRLAEELKEELR

SEQ ID NO: 20543 - protein, 60 aa, Artificial Sequence
  Synthetic
DKLDEIKERIERLVETDLRVIKRILEEADELIKENEKLIEKILRDNRRLIEEVEEIIRRD

SEQ ID NO: 20544 - protein, 59 aa, Artificial Sequence
  Synthetic
EKKLRELKKRVDELREESKDLNDKLEKRIRDLKRELKKLNDRHEEELRKLKERLRRATK

SEQ ID NO: 20545 - protein, 60 aa, Artificial Sequence
  Synthetic
DELDEILKTADKLAEDDLDTIRRLLEEVRDLVRKDKEVIKRILEEIDRLIKEVEDIIRRD

SEQ ID NO: 20546 - protein, 59 aa, Artificial Sequence
  Synthetic
EKKLKELEDRVRELKRRSEELLKKVEETLRRLKEESRRLNEELERTIRELEERLRRATK

SEQ ID NO: 20547 - protein, 56 aa, Artificial Sequence
  Synthetic
SKEDRAREELKRLKEELEKLLEEHRKTLEDLNRELKRLVDEHEKSIRELRKELKDS

SEQ ID NO: 20548 - protein, 56 aa, Artificial Sequence
  Synthetic
IDDVIRRVRETIDEVVRRIEELLEENRKLIEDLEEKIRRLNERLKRLVEEIKERDR

SEQ ID NO: 20549 - protein, 56 aa, Artificial Sequence
  Synthetic
SERERVREEVRKLLERLRELLERHRRKLEKLNRELEKVLEDHRRTLERLKEELERS

SEQ ID NO: 20550 - protein, 56 aa, Artificial Sequence
  Synthetic
IDTVLEEARKLIEKAERDIRRLAKENEKTIEEVKERLKKLMEENKRLIEEIKERTR

SEQ ID NO: 20551 - protein, 60 aa, Artificial Sequence
  Synthetic
SEIEDLLRRLKEVADEIKERLKKLSEESEELVRRVKRRIEELNKENREVMKEIKRRIDSG

SEQ ID NO: 20552 - protein, 59 aa, Artificial Sequence
  Synthetic
EEDVRRLAEDIRRLLEEIEKLLKEHEEKNRKLKKELEDLVRRHRKSVEDLKREIRERSR

SEQ ID NO: 20553 - protein, 56 aa, Artificial Sequence
  Synthetic
DDEERLEETLERLERELKKIADEHRRRNEELRDTLRRIAEELRKTHKDLLERLEEE

SEQ ID NO: 20554 - protein, 59 aa, Artificial Sequence
  Synthetic
KRVVEEVERKLRRLMDRIREELKRLTDESEDLVTKILDTVRRIVESIKKLVDELREERK

SEQ ID NO: 20555 - protein, 60 aa, Artificial Sequence
  Synthetic
DEAERLLERVDKAHERSEELLDRVLKENRKVLEEIRKLADDLRKLLDDIMRRIEDLVRKE

SEQ ID NO: 20556 - protein, 59 aa, Artificial Sequence
  Synthetic
DRDLREIERRLKEIEEENRKLVKRLEDENRKIAREVEKLVERLERRLREIARRVEESVR

SEQ ID NO: 20557 - protein, 56 aa, Artificial Sequence
  Synthetic
REKEELKKSIERVKRELERLLEEHRKRSEELKRRLEELLKDHKRRTDEVLKEAKDK

SEQ ID NO: 20558 - protein, 56 aa, Artificial Sequence
  Synthetic
VDTLEEEIKDIIRDVKRAVKESLEEDDRLAKEVEDMVRKSKEEVERLIEKVKRDTD

SEQ ID NO: 20559 - protein, 56 aa, Artificial Sequence
  Synthetic
REKEELEKEIERIKREIKKMLDELKRHSEELKRRAERLLEEHRRETERIIREMRES

SEQ ID NO: 20560 - protein, 56 aa, Artificial Sequence
  Synthetic
VKTLLEEIRKILKEVEDRIREILREDKRLADELEKAVRDSLREVKRILDEVREAVR

SEQ ID NO: 20561 - protein, 56 aa, Artificial Sequence
  Synthetic
DEDKRLADEIKRVLDELKKSVKEHRDHSEELLRRAKELLKRHEDETRKIEEEARRN

SEQ ID NO: 20562 - protein, 56 aa, Artificial Sequence
  Synthetic
VETLKREIEELIRRAKKVNKESKEDDRRLADEVRKVVERSEETVKRLRDEVTERVR

SEQ ID NO: 20563 - protein, 56 aa, Artificial Sequence
  Synthetic
REKEELEKELRRIKRELEKILEEVRKRSKELLDRLRELLRRHEAETEKAIEEMERA

SEQ ID NO: 20564 - protein, 56 aa, Artificial Sequence
  Synthetic
VDKLLRDVREIAREAKRVIRRILKTDEDLARELEEIVRRSLKKVEDLIRKVKEDAR

SEQ ID NO: 20565 - protein, 60 aa, Artificial Sequence
  Synthetic
SEEEKLEEIIRRSRKRLKELIDRLRELVKKIDDDLKRLLDEHRRRLEESERRAEELLKKV

SEQ ID NO: 20566 - protein, 56 aa, Artificial Sequence
  Synthetic
VEKVLKELEESSRRVVELIKKLMRELEKLLRDVEERAKDLLRKNTRSSEELEKRIE

SEQ ID NO: 20567 - protein, 60 aa, Artificial Sequence
  Synthetic
SEEEKLKKLLDESEKRLREILKRHEEIVRDIKRRLEELLKRHKELLDRSLKRLEELLKEN

SEQ ID NO: 20568 - protein, 56 aa, Artificial Sequence
  Synthetic
VEELLERVKKSSEDVAREIRKLARDNERLLEEVKRLIRKLLEENRESSKDVEDKIR

SEQ ID NO: 20569 - protein, 60 aa, Artificial Sequence
  Synthetic
SKEEELRDKLRKIRKRLEELLERLAREIDRIRRALEDLLRRHKEELDRSRKRAEELLKEI

SEQ ID NO: 20570 - protein, 56 aa, Artificial Sequence
  Synthetic
VDRVLEELDRLLKEVEETIRDLARKLRELLKRVEDTLRKLLKENKDSSRRLEEEIR

SEQ ID NO: 20571 - protein, 60 aa, Artificial Sequence
  Synthetic
SKEEELARMIEESVKRLKKLLDDLRKVIKESKDRLKELIDDHRRILEEIRRELEELLKKK

SEQ ID NO: 20572 - protein, 56 aa, Artificial Sequence
  Synthetic
VDKLLKEIEDSSRKLAEEIKKLIDEIRESSKEVIERVRRLLERNKELVRKVKEEIR

SEQ ID NO: 20573 - protein, 60 aa, Artificial Sequence
  Synthetic
SEVEKLEEEIKKINDEIRRLSDKNLEDLKRILEEIEDLSRRNLKKTKDILREIEEEAKRR

SEQ ID NO: 20574 - protein, 59 aa, Artificial Sequence
  Synthetic
DEFAERLKRSLEDSKRTSKELVDENRKLNEELERTVRKLIEDNKRLNDRVEKRVKELAD

SEQ ID NO: 20575 - protein, 58 aa, Artificial Sequence
  Synthetic
SLEDEIRRLIEEIKRKLKELLERLKEEIDRIREELKKSNRKLDELSRRIEEEARKRVG

SEQ ID NO: 20576 - protein, 59 aa, Artificial Sequence
  Synthetic
EEKIERVLREMEKLLRELERIAREVLKEIEKILRENKKHNEEVMERNKRLAKELKEKAD

SEQ ID NO: 20577 - protein, 58 aa, Artificial Sequence
  Synthetic
DLEREIDELIKDIARRLEESNRELEKLVRRIEEELRRSNKELEDLSRRIKTELRKEVG

SEQ ID NO: 20578 - protein, 59 aa, Artificial Sequence
  Synthetic
EEKAKRVADEIRKILRENEEHNEEVARRIEEILRRNKKHNKEVADKNRELLKKLKEEAR

SEQ ID NO: 20579 - protein, 56 aa, Artificial Sequence
  Synthetic
KLVEEIRKSAEDNRRRLEKLVRESKKSLDDNERENRKLVDELRKIATKIKEDLERD

SEQ ID NO: 20580 - protein, 59 aa, Artificial Sequence
  Synthetic
KEAVDKLEEENKRDHDEYKKVVDELKKENKEDHERSRKLAEDLKRLLEDIRRRIKETRR

SEQ ID NO: 20581 - protein, 59 aa, Artificial Sequence
  Synthetic
DEVEKLIEDLKEVTKKHAKRVEETNRHNEDVLRKVAKEVKRILDDVKRVVDEVKKVVDA

SEQ ID NO: 20582 - protein, 59 aa, Artificial Sequence
  Synthetic
DKAKKKLEDVLKRSREEIERLKDDSRKSVDETRERLKKLKEDLKRLLEEVRKEVEKLKR

SEQ ID NO: 20583 - protein, 59 aa, Artificial Sequence
  Synthetic
SEVEKLIKELRDVLKKVAEDVEKTNRDLEEVSKRSAEKVKKLEDELEKVLREVEELVKN

SEQ ID NO: 20584 - protein, 59 aa, Artificial Sequence
  Synthetic
RKAEEDLRKVLTEIRKRAEELRRESDESVKRSRKELERLLREIEKRVEEIEDRARKAKK

SEQ ID NO: 20585 - protein, 56 aa, Artificial Sequence
  Synthetic
EEVERIIEEIRDEVKKAAEKVEKVLKESREISKRAEDEVRRVLDEIRKLDETLRDA

SEQ ID NO: 20586 - protein, 56 aa, Artificial Sequence
  Synthetic
REKLRKVLDEIRREIERLKERLDRLDEESDRKSEKLKEDLERLLREIEKRIRDERR

SEQ ID NO: 20587 - protein, 56 aa, Artificial Sequence
  Synthetic
DEVRKVLEEIKELLKRLAEKVKKLIKESREISKRAAEKVKRLIEKSRRLLDTLEKA

SEQ ID NO: 20588 - protein, 56 aa, Artificial Sequence
  Synthetic
KDTLKTVLDTIKKKIEELVKELREVDEESKKRSKELKEEMDKVDEDIKRAIERRTR

SEQ ID NO: 20589 - protein, 56 aa, Artificial Sequence
  Synthetic
DEVRKVLEDIKRDLDRLAKRVKDVLREIEELTKEAARTVKKVIEESRRLLRKLKEA

SEQ ID NO: 20590 - protein, 56 aa, Artificial Sequence
  Synthetic
REDLTELLKRIEEKIKRLVEELERLLKRSREESKRLVEEMEKVNREIEEEIKKRAT

SEQ ID NO: 20591 - protein, 60 aa, Artificial Sequence
  Synthetic
EEVERLLKEIKDLLDEVARENKEALKRSKELLEEVAEDNKRVLREIEKLLEDVERKVKDE

SEQ ID NO: 20592 - protein, 59 aa, Artificial Sequence
  Synthetic
KELLKELEDLLRKARKTVEDLDRELEELNEEIRKALEELDKELERLVREIRKRLEDARR

SEQ ID NO: 20593 - protein, 60 aa, Artificial Sequence
  Synthetic
REAEELLKEIERLLREVERENKKALEDSRRLLEEVAEEVKKVLREIEELLKTLEELVRKE

SEQ ID NO: 20594 - protein, 59 aa, Artificial Sequence
  Synthetic
EELLRELKRLLEEIERRVRELDEELRKLNEDIKRELERLIRELEELLKRAEETLRRLKD

SEQ ID NO: 20595 - protein, 60 aa, Artificial Sequence
  Synthetic
SEVEDALRRLKELLRRVAEENRKVLEESKKLVEDARRKNEEVLKEIEKLLEDVAREVKDR

SEQ ID NO: 20596 - protein, 59 aa, Artificial Sequence
  Synthetic
EELLRELKKLLEEIKKSVEDLDRELKKLNDEIRDESRKSKEELERLLEDIERALRELAR

SEQ ID NO: 20597 - protein, 60 aa, Artificial Sequence
  Synthetic
SEAEEVLRRIEELVERATRTVEKLAEESKRLLEKLAEENKRVLEEIKRLLDEVADKVRKK

SEQ ID NO: 20598 - protein, 59 aa, Artificial Sequence
  Synthetic
KELLDELKTLLDEITKRLKDLTDKLERLNDKIRRELERLDEELRELLERIREEMEKLTR

SEQ ID NO: 20599 - protein, 60 aa, Artificial Sequence
  Synthetic
DLEEELKELLERIRKAHEELIKELEDLTEKIERDHEKLIKRLEDLLKRIEDEMRKLLEEI

SEQ ID NO: 20600 - protein, 59 aa, Artificial Sequence
  Synthetic
SRTVKEILKRIEDSLRRAAKKVKDLAEENKDSLRRVAEKVERILEELKRLLEEIARRVK

SEQ ID NO: 20601 - protein, 60 aa, Artificial Sequence
  Synthetic
SLEEKLEDLIRRLKESNERLKRELERLIEELRKNNERLLKELDDLVEEIERALRDLLREK

SEQ ID NO: 20602 - protein, 59 aa, Artificial Sequence
  Synthetic
SRKVEKILKDAKDSNKKVADTVREILKRARDSNKRVAERVKDLLRRLRELLKELAERVK

SEQ ID NO: 20603 - protein, 60 aa, Artificial Sequence
  Synthetic
DLEEELKELIKRIRDAHRELKERLDKLVEEIKRNNEKLSDDVRRLVREIEKELRRLLEEI

SEQ ID NO: 20604 - protein, 59 aa, Artificial Sequence
  Synthetic
KEKVKKLLKELEESLKRVADEVKRLLEELERSNREVEKRVRELLEEARRLLKDLADKVR

SEQ ID NO: 20605 - protein, 60 aa, Artificial Sequence
  Synthetic
DLERELRELIKRIEDDIRKNVKRNEESIRKTEDELRKNVRENERLIEEMRKELEKLRRRN

SEQ ID NO: 20606 - protein, 59 aa, Artificial Sequence
  Synthetic
EEVARKLLDELREIKKRINDTSRTTLEDNKRLAKEIHDSSKESLKRLKKILDDIREEAR

SEQ ID NO: 20607 - protein, 60 aa, Artificial Sequence
  Synthetic
RLAEELRKLIDKVRRDLDRNRETNRELIKRAKDELRKNEEENRRIIDEIRRALEDLTRKN

SEQ ID NO: 20608 - protein, 59 aa, Artificial Sequence
  Synthetic
EEAVRKVKKEIEDIVREIHKLSKRTLEELERIVEKIHEDSKRMLERVKKLLDKIRRDAE

SEQ ID NO: 20609 - protein, 60 aa, Artificial Sequence
  Synthetic
SLAEELRKLIKRVEDEIRRLAEENKDLIRKARETIRKNEETNREVITRIRREIEKLEKDN

SEQ ID NO: 20610 - protein, 59 aa, Artificial Sequence
  Synthetic
EEVVRELLKEIRKVLEDIRRESKTSLDDIRRLLKEINDLSEETIREAEELLDRIRKKAT

SEQ ID NO: 20611 - protein, 60 aa, Artificial Sequence
  Synthetic
SLREELKRLIDESRKSLRENEERNKKSIDDTRRLLRENERRNRETIKELKKTLDELRRRS

SEQ ID NO: 20612 - protein, 59 aa, Artificial Sequence
  Synthetic
KEAVDRLLERIRRINEEINRTSEKTLEENDRLVKELHERSERLLRKLEELLRKIDETIR

SEQ ID NO: 20613 - protein, 60 aa, Artificial Sequence
  Synthetic
SLAEELRRLIEEVKKRLKELEDRNRKLIKEARDELKENEETNRKTIEDIERTLEKLERDN

SEQ ID NO: 20614 - protein, 59 aa, Artificial Sequence
  Synthetic
EEAVRDLLRRIRELLRDLERLSEESLRKLKEIVEDIHRKSKTMLDKLRKMLEELRREAT

SEQ ID NO: 20615 - protein, 60 aa, Artificial Sequence
  Synthetic
SLAEELKRLIEESRKSVEELERRNRKLIEDARRDLERLARENRKLIEEIRRRLKDLAKDN

SEQ ID NO: 20616 - protein, 59 aa, Artificial Sequence
  Synthetic
EEVVRRLLEEIKRLNDEAKRKSKESLDRLREILKEIRKTSERTLEKLKRILDRIREEAT

SEQ ID NO: 20617 - protein, 60 aa, Artificial Sequence
  Synthetic
SEIEELLERIRDLMRRINKKSEDHLRELEKILREIRRLAEKSNEEIERLLRELEDLAEKR

SEQ ID NO: 20618 - protein, 60 aa, Artificial Sequence
  Synthetic
MKDLKKTLDDLLDELRKDIERNVKENRDTLKRIEDDIRRLAEENKKLLEEVRKKIEELET

SEQ ID NO: 20619 - protein, 60 aa, Artificial Sequence
  Synthetic
SEIEELLRRLEDILRRIEELIRKVLKELRDLVEKSNDLSRRHLEDAKRILKEIEEEVKRR

SEQ ID NO: 20620 - protein, 60 aa, Artificial Sequence
  Synthetic
VEELRRRLRKILEDIRKRIEELVEELRRLLKEWEEESKKNDETNREVLKRIEDRIRELER

SEQ ID NO: 20621 - protein, 60 aa, Artificial Sequence
  Synthetic
DEAEEIKERIKKVVEDLERKVRELLRRSEKLAEDLHELSKENIERMKRLLEELEDLVRKR

SEQ ID NO: 20622 - protein, 55 aa, Artificial Sequence
  Synthetic
EEIEDLLRKVEERIRELEEELRRLNKKIEEEVRRNKDENRRVNEEIERRIRELAR

SEQ ID NO: 20623 - protein, 60 aa, Artificial Sequence
  Synthetic
DESKEILDRIRKVNEDLRRLAEELLKDSRRVVEEAHKLSEDNIRRLEELLKEIEKEVRRR

SEQ ID NO: 20624 - protein, 55 aa, Artificial Sequence
  Synthetic
DKIRKLLEDSKKTSDELKEELDRLNEEIERSVRDNKRRNEEVNKRIEDEIRKLAT

SEQ ID NO: 20625 - protein, 60 aa, Artificial Sequence
  Synthetic
SEAETILEKIRRANEELNRLSEENIRKSRKVVKELHELSKENIKRARDLLREVKKLVEKR

SEQ ID NO: 20626 - protein, 55 aa, Artificial Sequence
  Synthetic
ESIKELLKEVEDDVRKNKEENKKVNKEAEDEVRENKERNTRVNKEMEEEIKRLAK

SEQ ID NO: 20627 - protein, 61 aa, Artificial Sequence
  Synthetic
SERERLERLVREAAKELKRLLEELERLHKKIDEDLKRSNDRLRELHERIKKDIERLLRRIG

SEQ ID NO: 20628 - protein, 56 aa, Artificial Sequence
  Synthetic
VEEILKEIEDILRKVKEDVKRVLDENRRVLEENKEHAERILRENKRMLEELRREAK

SEQ ID NO: 20629 - protein, 61 aa, Artificial Sequence
  Synthetic
DSEERLRKLMREAREELKELLRRLRELHEEIRKRVEELLRRLEELSDKLRRDLERLLREIG

SEQ ID NO: 20630 - protein, 56 aa, Artificial Sequence
  Synthetic
VEELLKTIKELVDRLRRIVEKVLDENRRLLKRLEEEIKRVLDENREMLDRLRKAAE

SEQ ID NO: 20631 - protein, 61 aa, Artificial Sequence
  Synthetic
SKEETLEKLVREVKDRLKKLLEEVRRLTEELERELKKLREELEELSKELEKDLRRLKKRVG

SEQ ID NO: 20632 - protein, 56 aa, Artificial Sequence
  Synthetic
VEELLKRIKELLEELERRVEEVLRRNRELLKRLEETIRKVLEENKKLLKEVREDAK

SEQ ID NO: 20633 - protein, 61 aa, Artificial Sequence
  Synthetic
DKEEELRRLVEEVEKRLRELEKELEDLTDKIEKRLRESNERIKKLSDDIRRRLEDLLRKVG

SEQ ID NO: 20634 - protein, 56 aa, Artificial Sequence
  Synthetic
VEELLKRIRDILKRVEEIVKEVLERNRKVLEDNERHAEEVLRRNKRLLEELEKRAT

SEQ ID NO: 20635 - protein, 61 aa, Artificial Sequence
  Synthetic
SKEDDLRKIVKEIEEEVRKLLKELEELTKELEDRLRESNKTLKELNERIKRRLEELLRRIG

SEQ ID NO: 20636 - protein, 56 aa, Artificial Sequence
  Synthetic
VEEVKKELEDLLRRLREEVKRVLDDHRRILKENEDHAREVLKRNKELLRKLEEEAK

SEQ ID NO: 20637 - protein, 61 aa, Artificial Sequence
  Synthetic
SKEERLKKLVDDVRKTAEKLKRDLERLTKEAEETLERLKRELDRLNREIAEEIKKILDRVS

SEQ ID NO: 20638 - protein, 56 aa, Artificial Sequence
  Synthetic
VETLLEEIERKLREVEKRIREVLKRHRELLRRLRETIKRVLERNKELLDRLREAAR

SEQ ID NO: 20639 - protein, 61 aa, Artificial Sequence
  Synthetic
SKEETLKKLMDRAEEELRRLKRELEELNDRIREALKKLNEDLRRLHEKIKEDIRKLLEEVD

SEQ ID NO: 20640 - protein, 56 aa, Artificial Sequence
  Synthetic
VEELLETIERILEEVRRRIEKVLEENKRLLDENKKHAEESLKKNKELLKRLRDAVK

SEQ ID NO: 20641 - protein, 59 aa, Artificial Sequence
  Synthetic
SEVDEVRERLERLLRTVERVVERILRELKRLNDELRKIAEDLLRENKDLLRELAERVRK

SEQ ID NO: 20642 - protein, 59 aa, Artificial Sequence
  Synthetic
SEALKDIEKLVRKIKEELKRLLKEVAETLERSERSLDKLIEDHRRLVEDIERALKELRK

SEQ ID NO: 20643 - protein, 60 aa, Artificial Sequence
  Synthetic
SEVEKVLETIKDLLRKLEEIVKKILDEDRKLMEKVTKIVEDLLEENKRLLEELERLAREG

SEQ ID NO: 20644 - protein, 59 aa, Artificial Sequence
  Synthetic
SELLKRIRELVKEVKDRLRRLREELEESVRRARKTLEDLERRHRKLLKDIRETIKELIR

SEQ ID NO: 20645 - protein, 55 aa, Artificial Sequence
  Synthetic
DLDREIERLVEELERRLRELLRRNEELVKRVEDELEKLKRESEKLLRELRKKLEE

SEQ ID NO: 20646 - protein, 59 aa, Artificial Sequence
  Synthetic
KEAVDKLLKELKDILKKLEELSRKSMEDIKDILRRYEKLVKELLDELKKILDELDRADK

SEQ ID NO: 20647 - protein, 55 aa, Artificial Sequence
  Synthetic
DLKDEIEELVKRARERLERLREESEEIVKELEKVLRDLEKENRDLARRLRDELRK

SEQ ID NO: 20648 - protein, 59 aa, Artificial Sequence
  Synthetic
EEAVRRLKDELRRILEEYERVVEELKKRLKDLLREAERLSKESLDELKRILRKLKEDAK

SEQ ID NO: 20649 - protein, 60 aa, Artificial Sequence
  Synthetic
SLEDELRRLVEEDERNIRKLNDENRKSVRKLEELLRRLNKRNRETIERIKRLLDRLREES

SEQ ID NO: 20650 - protein, 59 aa, Artificial Sequence
  Synthetic
KEEIDRILRKVERLSRKAHEDVRRINEELEKLLEKLKREVKRENDRVEEEAKRLADEVK

SEQ ID NO: 20651 - protein, 60 aa, Artificial Sequence
  Synthetic
REVDELVKRIEELLREMKKKNDESLKDSRDLLRELEKRVERVIEEIEKLLRDLEELVRKE

SEQ ID NO: 20652 - protein, 56 aa, Artificial Sequence
  Synthetic
EKRLKKLLDELRDMSRKADRALRELNKDVARKIEELRRRLKKLLDEVKERADELTK

SEQ ID NO: 20653 - protein, 60 aa, Artificial Sequence
  Synthetic
SEAEKLLEDLKRLVEDLRRKNKKLNDDNERLTTELEKTSRKLLEELKRLLEKVADDVRRT

SEQ ID NO: 20654 - protein, 58 aa, Artificial Sequence
  Synthetic
ELKERLDRLLEEVKKTIRELEKRNRESHKRTKDVARRSAEETKRVLEKIEDDLRKLDK

SEQ ID NO: 20655 - protein, 60 aa, Artificial Sequence
  Synthetic
SEAEKLLKEIKDLVDELRKRSKELIDENKRLTEEVEERARRLLTELRKLLKRLEELVRRE

SEQ ID NO: 20656 - protein, 58 aa, Artificial Sequence
  Synthetic
ELEERIRRLLREIEKEAKRSRDRSREVHRRTDEELRRLEREIKEILKEIKRKLDELRR

SEQ ID NO: 20657 - protein, 59 aa, Artificial Sequence
  Synthetic
SDVDRLLKENRDVSKKVEDDVRRLLEELKRISEEIARRVKRLLEELRRILREIEELVKK

SEQ ID NO: 20658 - protein, 59 aa, Artificial Sequence
  Synthetic
DELRRRAEKSIEDNERKLRKLEEDAKRIIDDNERILRDLERRAKDVIREVRKALEDLKR

SEQ ID NO: 20659 - protein, 60 aa, Artificial Sequence
  Synthetic
DEAEKLLEEVKEENRRVNEDIKRVIEEIKKLIDESRRLMEKIIRDVEALLTRIRDVVEKL

SEQ ID NO: 20660 - protein, 59 aa, Artificial Sequence
  Synthetic
EDVRREIERIMRELKKNLDRLEEEIRRIADELRRVNTRLEEEIKRVIDEARKTLEELRR

SEQ ID NO: 20661 - protein, 60 aa, Artificial Sequence
  Synthetic
SKEERLEEILRRHKKSLDEIRKELRKLLEDHRKSIEDLIRKLRELLERLKELLERLERSG

SEQ ID NO: 20662 - protein, 56 aa, Artificial Sequence
  Synthetic
VDRLITEIKRINEELRESVRRLLERAKRIDEELRRTAEELVKTIEKLAKELEETVR

SEQ ID NO: 20663 - protein, 61 aa, Artificial Sequence
  Synthetic
DEIEEVVERIRRIDKELNKRAEEVIRRNKELDERLNREIERVKEEIRRLIKRLEEVTRRDL

SEQ ID NO: 20664 - protein, 59 aa, Artificial Sequence
  Synthetic
EEAKKKLEDLLEEHERNLRKIERDLEELNERHERNLRKLKRELEEILKRAKEVLDELRK

SEQ ID NO: 20665 - protein, 61 aa, Artificial Sequence
  Synthetic
SEIEKVLREIEEIDKRLNKEVEDVLRENRRVDEELNRHSERVREEIERLVKRLDDVAREEL

SEQ ID NO: 20666 - protein, 59 aa, Artificial Sequence
  Synthetic
EEMKKTLEKLLREHEENIKELKRRLEELNEEHERNIRRSEETLKKLLKEAEDRLREIKK

SEQ ID NO: 20667 - protein, 60 aa, Artificial Sequence
  Synthetic
EEAERVLKRIADLIEELKRHSEEVSRRSKKLLDDLSRHTEKVSKESEDLLRRLEELARRG

SEQ ID NO: 20668 - protein, 59 aa, Artificial Sequence
  Synthetic
REIEERLRTLRRRLERMVEEIERLNEENLRRVEKRVRELEKENEDNLREAKKLLDEIRR

SEQ ID NO: 20669 - protein, 60 aa, Artificial Sequence
  Synthetic
SEVEEVLKDIERLIKELREENKRSLDRSRRLAEDLERRNRESLRRIEKLLRELEKIARDL

SEQ ID NO: 20670 - protein, 59 aa, Artificial Sequence
  Synthetic
EEVRKRAEDVLRRLEEVIKELEKTNEDAKRELKRLIDELRRTNEEVNKRLEERLDKIRE

SEQ ID NO: 20671 - protein, 60 aa, Artificial Sequence
  Synthetic
SEVERVLKDIERLLKELEERNRRSLEESAKSTRKVEEDNKRSLDKSTELLKRLEEDAKDD

SEQ ID NO: 20672 - protein, 59 aa, Artificial Sequence
  Synthetic
EEVRKRAEDVRRRLEEILKRLKETNEDMKRENKRVLDELRKTNEDAEKKLRDLIRKLRE

SEQ ID NO: 20673 - protein, 60 aa, Artificial Sequence
  Synthetic
SEVEKVLKEIDELIKDVERTNRESLEESERLLEKLKRENERTVERSERLAEELERLAREL

SEQ ID NO: 20674 - protein, 59 aa, Artificial Sequence
  Synthetic
EEVKDRADKLLRRLEEMVEKIRRTNETLLRALEKLIRDLKRNNEEVEKRLREIAKKIRD

SEQ ID NO: 20675 - protein, 60 aa, Artificial Sequence
  Synthetic
SEVDELLKRLKKLLEDDKRLAEELLKTIEKVNDDTRKRSEELLRRLERALEELEKLVRKV

SEQ ID NO: 20676 - protein, 59 aa, Artificial Sequence
  Synthetic
EEVKRRLEEVLREIKRLVDETRKELRRIDEESKRLAEKSRRDSRRVEERLRTLLEELRK

SEQ ID NO: 20677 - protein, 60 aa, Artificial Sequence
  Synthetic
SEVEKLLEDMERLLKEDEELVRRLSKRSEEIVRDDRRRNKEILDEIRKLLEELKRLADRL

SEQ ID NO: 20678 - protein, 59 aa, Artificial Sequence
  Synthetic
KDVEERLRRAEERIRRAVERTRDHARRNHEKLKELVKETRESNDRLKKEIRKLLEELRK

SEQ ID NO: 20679 - protein, 60 aa, Artificial Sequence
  Synthetic
EEEERIREVKKRSEDLLEELKRSNERVERESDKLAEEIRRKLEELARRADEVIRRLRARK

SEQ ID NO: 20680 - protein, 56 aa, Artificial Sequence
  Synthetic
TEKLLEDLKRINKETERLNRELLRDLERINEETRERIDRLLRELERMIDELRKRVD

SEQ ID NO: 20681 - protein, 60 aa, Artificial Sequence
  Synthetic
SERERAEEIRKRSEDVVREMRESNKDVSRKSEELAKKLREDLKRVEKKVRELLEEIKREK

SEQ ID NO: 20682 - protein, 56 aa, Artificial Sequence
  Synthetic
TEELLKRLEEISRRSRELNRRLLEDLKRINKETKERADKLLEDLERLLEDIKRRVD

SEQ ID NO: 20683 - protein, 60 aa, Artificial Sequence
  Synthetic
DEDERLKEVEEESKKVADELRDRLRRLMEESRRRLKRLREEAEEIKRELDTIAEDLKREK

SEQ ID NO: 20684 - protein, 56 aa, Artificial Sequence
  Synthetic
TEEILRRLEEISEESERRVEKLLRENKEINEETDRRVKELLERLKEVLERIERRVK

SEQ ID NO: 20685 - protein, 60 aa, Artificial Sequence
  Synthetic
DERERLREVLERSRKLAEDLRRSNEELERRSRELAKELRKTNKELEKRLKDKADDLRREK

SEQ ID NO: 20686 - protein, 56 aa, Artificial Sequence
  Synthetic
TERLLEELERISEESKRRNDELLEKNERVNEETRRRNEELLDELRRLLEEVERRVK

SEQ ID NO: 20687 - protein, 59 aa, Artificial Sequence
  Synthetic
DIEERIREVLRKARRVLERSEERSRELVERLRRVLEDSRRRTKRLTEEAKELLDEVRKR

SEQ ID NO: 20688 - protein, 59 aa, Artificial Sequence
  Synthetic
KKLVEDLLREIEKIIKEIEDTTKRVVDELRRLLEEIKRTSDELEKEVRKLLEEIKRATD

SEQ ID NO: 20689 - protein, 60 aa, Artificial Sequence
  Synthetic
STREALKELIDRLRDLVRRIRDKHRKLLEEIKRVLDESERRHRELIKRVEELLRDLARRV

SEQ ID NO: 20690 - protein, 56 aa, Artificial Sequence
  Synthetic
VETIIRRAEEALKRLEDSSRKVEETIRKVLEDLRRSSEEVAERVRRVLERLEEKAQ

SEQ ID NO: 20691 - protein, 60 aa, Artificial Sequence
  Synthetic
SSEERLRKVIEDLKRLAEESRKRHKELIDELRKAVERIERRHKKLLDEIKKVVDDIRRRV

SEQ ID NO: 20692 - protein, 56 aa, Artificial Sequence
  Synthetic
VDTIIEEVKRVLEELKRSTEEVEKRVRDAIEELERSSEELARRIKEVLKRLEEETR

SEQ ID NO: 20693 - protein, 60 aa, Artificial Sequence
  Synthetic
SAEEKLDRLRKEVERLSDETRKELERILKKVEDVIRETRRRAKELEEELRRLIRDIEEKL

SEQ ID NO: 20694 - protein, 56 aa, Artificial Sequence
  Synthetic
IETVIREIERLLEEDRKAVEEILRRIEKLIEDDKRAVDRIVKEIKDILDKLREETR

SEQ ID NO: 20695 - protein, 60 aa, Artificial Sequence
  Synthetic
DIEDELRKLEEEIRRVIEKWKRLTEENRRENERVIRKWDKLSKDLADEIRRVIEDARRKL

SEQ ID NO: 20696 - protein, 59 aa, Artificial Sequence
  Synthetic
KELVKELVDRVKRLIREIEKEARRTSEENKDLLKKIEDDAKRSEDELRELIKEIKKRID

SEQ ID NO: 20697 - protein, 60 aa, Artificial Sequence
  Synthetic
DIEDTLRKLAEDIKKVERDMEESNRRNREKNREVIEKWKKLSDDLERELEEVIEDARRKL

SEQ ID NO: 20698 - protein, 59 aa, Artificial Sequence
  Synthetic
RELVRKLIEDVRRLIEEIRRENKESSDRNKRLVEEIDERAKRSADELKRLLKEIRDRID

SEQ ID NO: 20699 - protein, 60 aa, Artificial Sequence
  Synthetic
DIEEALDEVRKEIEEVIRRWKKLTRENEEENRKVIEDIRRRLDELRREIEKVIRDARRKL

SEQ ID NO: 20700 - protein, 59 aa, Artificial Sequence
  Synthetic
RELVKKLIDDIRKLIDEIRRDAERTSRDNKRLVEEIERTIEKLIREVKELLERIKEEID

SEQ ID NO: 20701 - protein, 60 aa, Artificial Sequence
  Synthetic
DIEEILKKVEDDAREVIKEMRKSNEDNKRKNKKVIEEIERTLKKIEDDARRVIDEIEKKL

SEQ ID NO: 20702 - protein, 59 aa, Artificial Sequence
  Synthetic
RELVKKLDDELKELIKKIRTDNKRSSERNDELVKEIRKRIEKLVREAKELLKRIREDID

SEQ ID NO: 20703 - protein, 60 aa, Artificial Sequence
  Synthetic
SIEETLDELRKKIEEVIRRMKKSNDDNEKENREVIDRIRRTNEEIRKRAERVIEDARRKL

SEQ ID NO: 20704 - protein, 59 aa, Artificial Sequence
  Synthetic
KERVDKLIREVEDLIRRIEEENKKSSEENKRLVRRIEKDNEDSIRELEKLIEDIRRTID

SEQ ID NO: 20705 - protein, 60 aa, Artificial Sequence
  Synthetic
SLEELLEKVKREIDKVLERIERIVRKNAKENERVIREDERLLRELVKEIKEVEDRIRKRG

SEQ ID NO: 20706 - protein, 58 aa, Artificial Sequence
  Synthetic
DLMRKLLEEVKELIKRLEEEIEKASREDRRLVEEAKEKSKELAKRIKEELKRIEDEVR

SEQ ID NO: 20707 - protein, 60 aa, Artificial Sequence
  Synthetic
DEVDDIIRKLKELIKELREKSKRISEENKRLVRRLEELSRRIIKEIKDLLEELKDRARKD

SEQ ID NO: 20708 - protein, 59 aa, Artificial Sequence
  Synthetic
EEVKDKLRRIKEEADKAIKDNEDLLRRNERENREAVKRNEELLKEVRREVEEVIRRTRK

SEQ ID NO: 20709 - protein, 60 aa, Artificial Sequence
  Synthetic
SEVEEVIKRIKKLNKETEDAVREVIKRIEDSNEKLLRDVEELIKKIEKALRDLEDKARRV

SEQ ID NO: 20710 - protein, 59 aa, Artificial Sequence
  Synthetic
REVEELLRRVKRHTEEVVRRVERELRRIAEHVKEVEKTVRELVRRIREKIREVVERVRK

SEQ ID NO: 20711 - protein, 60 aa, Artificial Sequence
  Synthetic
DEARELVKELEDLIREITKTVRRLLEESEELIKRIDDAVDDLRRRDEDLNREIKEEIEKR

SEQ ID NO: 20712 - protein, 56 aa, Artificial Sequence
  Synthetic
ERILRELEERVKELEKEAREILKRSEDETDKLREKAERILEDLERKNRRTMDEARR

SEQ ID NO: 20713 - protein, 60 aa, Artificial Sequence
  Synthetic
SEVEELVERVKRLIDEIRKRVTDSVEESKRLIKEIKEEVDRLAEEDKRLNERIKETIRRR

SEQ ID NO: 20714 - protein, 56 aa, Artificial Sequence
  Synthetic
ERIVKKLEEEIRKIIKEIRELNKRSEDETKKIVDEARKILEDLRRENEDTKRKITE

SEQ ID NO: 20715 - protein, 60 aa, Artificial Sequence
  Synthetic
SEVEDLAKRIEDLIRRILRENERSLEESKRLIDEIRKRIEDLLRRSKELIDRIREEVRER

SEQ ID NO: 20716 - protein, 56 aa, Artificial Sequence
  Synthetic
KRILDELRKAVKKLEDDSRRLNRESEERTKKLKKELDELLKKSKDETKKLVEDLRT

SEQ ID NO: 20717 - protein, 57 aa, Artificial Sequence
  Synthetic
SEVEKLLRELEDVIRRLREDVKRIVEEDERLNKRLNDELRRLSEKNDRLNDRIRREV

SEQ ID NO: 20718 - protein, 56 aa, Artificial Sequence
  Synthetic
KEKVKRLRELVKKVIEDMERILRRLEKANRESAERAKDVLRRNHKKDEDSKRELER

SEQ ID NO: 20719 - protein, 57 aa, Artificial Sequence
  Synthetic
DRVREIVERVERVIRDILRTVEKLSEENKDLNRRLTEKIRDLERRDRELNKRLRDEV

SEQ ID NO: 20720 - protein, 56 aa, Artificial Sequence
  Synthetic
KEIVEDLRRKVEKVKRDAEKLLEDNHRRDRRNLREIEKIVEELKRRNEKTLRDLTK

SEQ ID NO: 20721 - protein, 57 aa, Artificial Sequence
  Synthetic
SEVEKLEEEVKEVIERLLRTVRDLSRRNEELNKRLTEDNERILKEDEDLNEELERRV

SEQ ID NO: 20722 - protein, 56 aa, Artificial Sequence
  Synthetic
KDVLRKLKKEAEDAIKEAEDILRENHEKDKKNKEDSEKLLRDLERRNEETLRRLRK

SEQ ID NO: 20723 - protein, 59 aa, Artificial Sequence
  Synthetic
RIEEILETLREELRTVLKKSKEILDELRKENKESIDRSKEILDRLRDEIRRILREIREK

SEQ ID NO: 20724 - protein, 59 aa, Artificial Sequence
  Synthetic
DEELKRAADKVKKLIKELDEENKKARDDDKRLNKKLNKDNDDLRREVEELLKRLRDEAE

SEQ ID NO: 20725 - protein, 60 aa, Artificial Sequence
  Synthetic
RIEDLVRDNKRKNDENTKRHERIVERLEEELRELVKRHEEDVRRLRKELEDLKRDAERKG

SEQ ID NO: 20726 - protein, 59 aa, Artificial Sequence
  Synthetic
DKKVEDLDRDNERLNRELTRHLEDLVRRVKELLRRMEEHLRELAERVKKLLDELRKEAT

SEQ ID NO: 20727 - protein, 60 aa, Artificial Sequence
  Synthetic
SDVEELAERVRRLSEEHAELVKRIVETSKRLNDDLRRMVKEIADRVRRLLEDIERKVRED

SEQ ID NO: 20728 - protein, 59 aa, Artificial Sequence
  Synthetic
EDVRKIIEDLRRHLEENRERVERIIRELRRLTEKTKKELEDIARELEKLVDELREEVRR

SEQ ID NO: 20729 - protein, 60 aa, Artificial Sequence
  Synthetic
SEVEKAEEDIRRLLKEVKDMDKKIVDDDERLNRELERTVRELAKEIEKLIRDLEERVRKE

SEQ ID NO: 20730 - protein, 59 aa, Artificial Sequence
  Synthetic
KDVKKIIKELEEELEKIAKESEESIKRLRKENRDSEERLRKILEKLKKDLEDVKRELER

SEQ ID NO: 20731 - protein, 60 aa, Artificial Sequence
  Synthetic
SDVEDVVRKIRELIRENLKRSKEIADENRRLNTENRERSKTLEEEVRRLLEEVKERAERL

SEQ ID NO: 20732 - protein, 59 aa, Artificial Sequence
  Synthetic
EEVRRILEKLRDDLRKLNETNRRIIKELRERNEKSNRDNRKILEELKDRLKKLEDELRR

SEQ ID NO: 20733 - protein, 56 aa, Artificial Sequence
  Synthetic
DEVDEVDKRSKETLKKIEDDARRVLEEYERTLEKIKRDVDRVLKESEETVRKLRAD

SEQ ID NO: 20734 - protein, 60 aa, Artificial Sequence
  Synthetic
EKELEDLVRELEEINKRLEEELRKLVEELRRHLEELRDELRKLVEELRKINEELEDRLTK

SEQ ID NO: 20735 - protein, 59 aa, Artificial Sequence
  Synthetic
SEMEDLKRVSDEVKKELEDLNRKSAKVSKEVEEEAKRLNRESREVVRRLKEELEKLERD

SEQ ID NO: 20736 - protein, 62 aa, Artificial Sequence
  Synthetic
KEVADELKKILDTHRKVDKEAKDRSEKLVRDHREVDKDVKRESDEILKRAKDTLDEIRERLR

SEQ ID NO: 20737 - protein, 60 aa, Artificial Sequence
  Synthetic
SELEKILKEIEEELKRVKERLERLHREHERLLRDVTRKLRKLLRDHREVLERVREELRRR

SEQ ID NO: 20738 - protein, 56 aa, Artificial Sequence
  Synthetic
REDLERTLRRIKEEVRKVERKAKEVLRETREKLKRLLERAREVLDENKKRLDDVAT

SEQ ID NO: 20739 - protein, 60 aa, Artificial Sequence
  Synthetic
SLEDIRRRLRELVRRLEEELRRSHEELERLVRDLERRLRESLRKLEELVDRLKKEIEKRG

SEQ ID NO: 20740 - protein, 59 aa, Artificial Sequence
  Synthetic
DDTARRLLEEAKKELDRIKEENERALRKIKDVIRKIDEESKRLNKEVADLVKKIEDRIR

SEQ ID NO: 20741 - protein, 58 aa, Artificial Sequence
  Synthetic
DLEDIVREIEKLLRDLERKAREIHERDERLARDLERKHRDIIREIERLLDELRERVER

SEQ ID NO: 20742 - protein, 59 aa, Artificial Sequence
  Synthetic
RKKVEEELERVRRIIKELERRLRELHKENKKLLDEILEESKRLAEEVRKTIEDIKRKIK

SEQ ID NO: 20743 - protein, 60 aa, Artificial Sequence
  Synthetic
SEVEDLLRRDRELNREHKRLLEEASKKNKEELERVLEKVKELLERVKKRLDEAKEALERG

SEQ ID NO: 20744 - protein, 59 aa, Artificial Sequence
  Synthetic
ERLERVLRESRKLNKESHETLKELIDRNRKLNKELEEAVKKIEEEIKKLLKELKEEKDR

SEQ ID NO: 20745 - protein, 60 aa, Artificial Sequence
  Synthetic
SEVEKLLREDRELNKRHVEKVRELSERNKELLERHEEKLKKVAKEIEDRLRRLEEMLRRG

SEQ ID NO: 20746 - protein, 59 aa, Artificial Sequence
  Synthetic
DRLKRVEEESEELNKRSHETLRRLVEENKKRNKELHERVERIKRRLEKLLRELEEEIRK

SEQ ID NO: 20747 - protein, 60 aa, Artificial Sequence
  Synthetic
SEVEELLDEDRKLNEELTKSAKRLTDENKKLLEDMKRKAEELKKRVDELLKEVTDVLRRG

SEQ ID NO: 20748 - protein, 59 aa, Artificial Sequence
  Synthetic
DRLERVLRESRKLNEDSKKRLEELIKENKDDNDRLREDLERIVRELEKRLDKLRKDTET

SEQ ID NO: 20749 - protein, 61 aa, Artificial Sequence
  Synthetic
KELEDLLRRIKRLIDENRRLSKEVLEEVRKLSEKHKKEVEDILKEIKELIEEALRRIERDG

SEQ ID NO: 20750 - protein, 60 aa, Artificial Sequence
  Synthetic
KERLDRILKTLRELLRKLREDNERIRREIREIVKRNSDELARIEEELRKLLDDLAKKAEE

SEQ ID NO: 20751 - protein, 61 aa, Artificial Sequence
  Synthetic
KELEDVLKEVEELSRRHKRRAERVSEENRKLLRRLKEEARKILEDIRRLLKKLEERVRRDG

SEQ ID NO: 20752 - protein, 60 aa, Artificial Sequence
  Synthetic
RERLKRILDEIRRIVEKNKRDLERLLRENEELNKRLREELRRILEEIEELLRELEERLRK

SEQ ID NO: 20753 - protein, 59 aa, Artificial Sequence
  Synthetic
SEAEEALKELKETSDRHKEDLDRLHEEDRRTNEEVEKELRKLVDEAKKKLDRVREIVEE

SEQ ID NO: 20754 - protein, 56 aa, Artificial Sequence
  Synthetic
EELLRRLEEIVRDNKRRVEEILERNRRLNEESEKKVRDIIKKLRDDLERLARELEK

SEQ ID NO: 20755 - protein, 59 aa, Artificial Sequence
  Synthetic
SEAEEALKELKRTSDEHRKRLEDLHRRDKKLNDDSKRRLDELLKRDEDTNRTVLDIARQ

SEQ ID NO: 20756 - protein, 56 aa, Artificial Sequence
  Synthetic
EELLRTLEKIVEDNAREVTEIIKKNRKLNDDSRREHERINDESRRLNEETEKRLRD

SEQ ID NO: 20757 - protein, 57 aa, Artificial Sequence
  Synthetic
DELEEILRRVDELIKTIEEELKKIEKRVKELLETHRELNKRLLDDHRRLAEEVKKAN

SEQ ID NO: 20758 - protein, 60 aa, Artificial Sequence
  Synthetic
RDRVEDVLRKIAEKIKRLEDRIKEVLDKLRKLAKELEDESRKVLDDSNKLIERVKRELKR

SEQ ID NO: 20759 - protein, 60 aa, Artificial Sequence
  Synthetic
DTERVVTEIKKTNDELKRRHEKVVEDDRRLLEELRRRHERVVREVERLLRELKERVDRRA

SEQ ID NO: 20760 - protein, 59 aa, Artificial Sequence
  Synthetic
REVLKKLLDDNRKIIEDLTRKNEKLHEDSKRIIEKIDDENREILRRVEEIVRRIEEELN

SEQ ID NO: 20761 - protein, 55 aa, Artificial Sequence
  Synthetic
SAEDVKRRIKESADRIRKRLREALERAKKLHTDNEEENKRVNDEIKKRVEEIRRR

SEQ ID NO: 20762 - protein, 59 aa, Artificial Sequence
  Synthetic
EKLLRELERDVRRLEREITEVVKRLEDEHKRASERNKRLLEEIKDRVRKLIEEAEERRK

SEQ ID NO: 20763 - protein, 60 aa, Artificial Sequence
  Synthetic
EEVERVRRTIDELSKENEKALKEVEERIKKLSDENEKAVRKAEEDNERLNRTAERLKRSN

SEQ ID NO: 20764 - protein, 56 aa, Artificial Sequence
  Synthetic
EKVLRDIRKKIKENHEKNERVIREIERLLKENEERNEEVIRRIKESNRKTEKDLTD

SEQ ID NO: 20765 - protein, 60 aa, Artificial Sequence
  Synthetic
SEVEEVERRIDRLSKENRRVLEEAKRRIKKLSDENKRMLEEARKRNEKLNREVKKLKKSN

SEQ ID NO: 20766 - protein, 56 aa, Artificial Sequence
  Synthetic
EKVLRDIREKAKRNHDANEKVIREIRDILRRNNEENKRVIEEIDKSNKDTEDELRK

SEQ ID NO: 20767 - protein, 59 aa, Artificial Sequence
  Synthetic
REVEEVKKEIKKLSDENKEVLERARKRIEDLSRENEDVLRRLKERNEDLNRRVRELKER

SEQ ID NO: 20768 - protein, 56 aa, Artificial Sequence
  Synthetic
EEVLRDIRRELKENHDENRKVIEDVRRIAEENHRRNKRVIDEIRRSNKETVDELRK

SEQ ID NO: 20769 - protein, 59 aa, Artificial Sequence
  Synthetic
RAEELRKEIEEIIKKNKKENEDVLREDRRRLKELKEEIEKVVREDRRTLEELEERLRRS

SEQ ID NO: 20770 - protein, 59 aa, Artificial Sequence
  Synthetic
EEVLKEIRERVEKLSEKNKRALEKWKRDSERLSREVERELEEWKKRSKRLAEEVEEATR

SEQ ID NO: 20771 - protein, 61 aa, Artificial Sequence
  Synthetic
DLEELEREVEKKLKELEDRVRKVIEESKTELKKLEEELRENSREVRDILRRLEEDVRRKVK

SEQ ID NO: 20772 - protein, 59 aa, Artificial Sequence
  Synthetic
KRLLEELRRRLDRVRKEVERLIKEHRETTDELRKRVEKLSEDHRREVEKLAKTVKDELK

SEQ ID NO: 20773 - protein, 61 aa, Artificial Sequence
  Synthetic
SRAEKIREDIRRLRKENEDRIKEIEDEFRKLLEEHERKNKEIEERVRRLVKRIEDEIRRKN

SEQ ID NO: 20774 - protein, 55 aa, Artificial Sequence
  Synthetic
DELAKRVREVSEDVNRRLDKIMKDLRRVIKELDEESKRLLEEIKRRMEEILEELR

SEQ ID NO: 20775 - protein, 60 aa, Artificial Sequence
  Synthetic
SEEEKLAKDNERLVREHEEESKKLLKTIRDLSEEHKRDLKRAMEENKEKVDRLRDMLKRG

SEQ ID NO: 20776 - protein, 55 aa, Artificial Sequence
  Synthetic
EEIATKSEELHKELEETNERIAREVEKLEKENDEILEEIADRSRRLHEDLDRERK

SEQ ID NO: 20777 - protein, 61 aa, Artificial Sequence
  Synthetic
DELEEVLRTIEKLVEDHNRELERVLRRVKELADRHREESERVAREIKKLVDDARRLVEERG

SEQ ID NO: 20778 - protein, 58 aa, Artificial Sequence
  Synthetic
DEVRRIRERVKELLDRNRERLERIEREIDRLLEDLKRKNEKIEREVRRLLAKLKEEAR

SEQ ID NO: 20779 - protein, 61 aa, Artificial Sequence
  Synthetic
SELEKIVEENRRLVKEHNERLKRILDELRELAKRHEDRSRKAMKENEELVRTVLELMKRDG

SEQ ID NO: 20780 - protein, 58 aa, Artificial Sequence
  Synthetic
EKVRKIREESKRLHETNRRRVEKIEEEIRRLLKRLEDTNRDIERRSKKLHEDLEREAR

SEQ ID NO: 20781 - protein, 61 aa, Artificial Sequence
  Synthetic
SELDKVMRDNDRLVKEHAEVSKELLDRLKKLAEDHKKRSEEVLRENKRLVDEVRRLAKERG

SEQ ID NO: 20782 - protein, 58 aa, Artificial Sequence
  Synthetic
EKVRKIARRSDDLHRELKERNDRIKREIERLLEELKRTNDKIVEDSKRLHDDLEREAR

SEQ ID NO: 20783 - protein, 61 aa, Artificial Sequence
  Synthetic
DELEEIRKTIEELSKENKKKLEEVMKEVEELARRHEKRSRDLLRRLKKLVDELRDRVEKTG

SEQ ID NO: 20784 - protein, 58 aa, Artificial Sequence
  Synthetic
ERVRKISEDVRKLLEDNKRIAERIDERIKELLKRLEDTNRRIEEEIDRLLEELKREAD

SEQ ID NO: 20785 - protein, 57 aa, Artificial Sequence
  Synthetic
DELDDLLRRAKETSDRHKETLKKILDEMREEVKRHNRDLERILEEVKRLIDEVRKAN

SEQ ID NO: 20786 - protein, 59 aa, Artificial Sequence
  Synthetic
REDVKRIKETMKKLLDENRTEVEKIKREADRLLEENRRLVKEIEDTIRELLKRLEDERR

SEQ ID NO: 20787 - protein, 60 aa, Artificial Sequence
  Synthetic
SKKETIKKDAEEALKRSKKKLDELKERLRKVMRETEERLRRLEKELRDLAREIREKIKKR

SEQ ID NO: 20788 - protein, 55 aa, Artificial Sequence
  Synthetic
DRLRKEVEDLNRETDKVIEKLREDIDRLDKESEEVIRRLKDEIRRLFEEIDRRLR

SEQ ID NO: 20789 - protein, 61 aa, Artificial Sequence
  Synthetic
SELEEVKERVDRLIREVEKMNRDSERRVKKLIDDVRRENRRTEEDVRRLVKRAEEIVRKDG

SEQ ID NO: 20790 - protein, 59 aa, Artificial Sequence
  Synthetic
KEKVDRLKKEADDLLRKIKEDNERITEKVKELLERLRKNNEEIKREADRLLEELRRRVK

SEQ ID NO: 20791 - protein, 57 aa, Artificial Sequence
  Synthetic
SELEELDKRITELSEEIKRRLEELLRRNEDLSRRIEEAIRRILKRNEDVIRDIKRKN

SEQ ID NO: 20792 - protein, 58 aa, Artificial Sequence
  Synthetic
KKVRDIEEKIERLNRELEKIAKEIRERTERLNKRLEELIREVDERNRDLLRRLEEEVK

SEQ ID NO: 20793 - protein, 60 aa, Artificial Sequence
  Synthetic
KDEEDARRKLEELRELARRDIERNKRELERLRREIEKDEEDNEEVIKRLRERVEELRRRQ

SEQ ID NO: 20794 - protein, 58 aa, Artificial Sequence
  Synthetic
ESLKRLKEELEKLLRDYKKKLDDSDKELRDLLAEYDDRLTRSDKRLRDLLKEAREKSK

SEQ ID NO: 20795 - protein, 61 aa, Artificial Sequence
  Synthetic
DTAERAEEELERSDRELKETLRRAEEELKRSHKELERIVERARRELRRLAEELEEVIRRKK

SEQ ID NO: 20796 - protein, 60 aa, Artificial Sequence
  Synthetic
EETLRRKLERLLERHKKVVDDVERTLRDLLERHKEVVERVREKLTDLLRKLKKVIDDVRR

SEQ ID NO: 20797 - protein, 58 aa, Artificial Sequence
  Synthetic
SELETIKKRAEELSKESEDILRDIERKLRKLSEESKDILRRLKEELEKLHKELVDKKG

SEQ ID NO: 20798 - protein, 59 aa, Artificial Sequence
  Synthetic
EELEKELEEVLTEYREVVERLADELRRLLKKYEDDVRRLEEHARRDLEKLDRDIKEEER

SEQ ID NO: 20799 - protein, 57 aa, Artificial Sequence
  Synthetic
SKLDDLLRKIERLVTESLRRLRKTNEDAKRLLERSVRELEKSNKEIRDLVKEIKERN

SEQ ID NO: 20800 - protein, 59 aa, Artificial Sequence
  Synthetic
KKKVDELRERLRELLKRHRDAVEKNRRDLEKLREDHRRLVEKNKRDLDKLKEELDRTKK

SEQ ID NO: 20801 - protein, 57 aa, Artificial Sequence
  Synthetic
SELDELLKRLEELVREIIKRLRDSNRRAKEVVDRSVKRLEESNRTLRELIKDVKDKN

SEQ ID NO: 20802 - protein, 59 aa, Artificial Sequence
  Synthetic
EEKLRRIKRRIDELEKTLRKIIKDNTDNLRKLTEDHRRLVEKNKRDLEKLEEELKRRRK

SEQ ID NO: 20803 - protein, 57 aa, Artificial Sequence
  Synthetic
SKLDELLERIREEVKRSVKRLEDSNKEIKRLMEESADELRRSNKELRDAVRDLKRKN

SEQ ID NO: 20804 - protein, 59 aa, Artificial Sequence
  Synthetic
EEKVRRLDKVLEDLRREHEKIVRDNEENLRRLLERHKRLVDKNKEDAERLLRELRETVR

SEQ ID NO: 20805 - protein, 59 aa, Artificial Sequence
  Synthetic
SELEELLKRLRDLIERIVKRLRELSKESEDLIRRIERTIEKLSEDSERAIEEILRRIDK

SEQ ID NO: 20806 - protein, 59 aa, Artificial Sequence
  Synthetic
EDRLREVEEEAKKLEKRIEDMIRKHKETNKRLKEELDKLVKEHKDRNRKLLEELKKRAT

SEQ ID NO: 20807 - protein, 61 aa, Artificial Sequence
  Synthetic
SEIEEVIERLDDTMRRIEERIRDTNRRLKKVIDDSKRRNERTNREVRKTIEKLTRELERDG

SEQ ID NO: 20808 - protein, 54 aa, Artificial Sequence
  Synthetic
EVKRRLEELRRRIEKMLEEHRESLRRLEEELEESHKRHKDTLRKLSKELEEKLK

SEQ ID NO: 20809 - protein, 61 aa, Artificial Sequence
  Synthetic
DEVDEVLKRVDELLKRHEETNKRLEEEIRKIHEENKRTIEELLKEVRKRAEEVERLVRRDG

SEQ ID NO: 20810 - protein, 59 aa, Artificial Sequence
  Synthetic
EEELKRVKERLKEIRKRAKESHDRLRETVKELIDRNRKLLRELEEELRKIEEKIREDAR

SEQ ID NO: 20811 - protein, 56 aa, Artificial Sequence
  Synthetic
SEEDELRETAKRIREEVKKSIEENRELAKRITDEVRELLERNKRRIEEVKERLERS

SEQ ID NO: 20812 - protein, 56 aa, Artificial Sequence
  Synthetic
EDDLRRRLEELLKRLRDESRKVNEDLKRLVDELRRLSKEMNEELKELEDRVREKER

SEQ ID NO: 20813 - protein, 57 aa, Artificial Sequence
  Synthetic
SEEDEVREDNKRIVEEVERLLKEIEDNNREITREAEELLKRLEEEARRLMEEIRRSK

SEQ ID NO: 20814 - protein, 60 aa, Artificial Sequence
  Synthetic
DEELLRRLRDMNRRSKERADRLIEEAKKENDRSSKRVRDLIREVDEILKEVKKRVEDVTT

SEQ ID NO: 20815 - protein, 56 aa, Artificial Sequence
  Synthetic
SEAEKVVEELKKLLREVEKKIRDHTEDVKRILEELERRLRKHSEEVRRTAKELKDK

SEQ ID NO: 20816 - protein, 59 aa, Artificial Sequence
  Synthetic
EKVLRELEKILEDIKRTLDKLLRENRETLKRIEDRLRELLEENRKLLEKIERELRERSR

SEQ ID NO: 20817 - protein, 56 aa, Artificial Sequence
  Synthetic
SEVEDVIRKLRRKAEDLTRRLKEHTDDVKRLMEELSKDIKDHTREVKRIAREAKEK

SEQ ID NO: 20818 - protein, 59 aa, Artificial Sequence
  Synthetic
EEVLRDLERVLRDIERRLRELLRRNEEVLDRIRRTLEDLHRKNEEVLREIERDLRERER

SEQ ID NO: 20819 - protein, 56 aa, Artificial Sequence
  Synthetic
SEVEDVIRRLKKKLRELVERIREHTKRVRDLARKLEEEIKRHTEEVKRIADEAKKR

SEQ ID NO: 20820 - protein, 59 aa, Artificial Sequence
  Synthetic
DELLKRLEDVLRKIRKDLEELLRKNNRDLEEIKKRLEELHRRNRETLERIRKDLEEDER

SEQ ID NO: 20821 - protein, 61 aa, Artificial Sequence
  Synthetic
SEIEEVLERIKKLLDELRKESRKLLEDHKKRAEELEEKARRLSERHKELLDRLKEVVDRDG

SEQ ID NO: 20822 - protein, 59 aa, Artificial Sequence
  Synthetic
EEMLKRAEDLLRRIDEELKRSHEELKELSDRIRERLERLLRTLEELSKEIDKRADDLRK

SEQ ID NO: 20823 - protein, 61 aa, Artificial Sequence
  Synthetic
SEIERVLEELRKLLEELRRESKKLLDELRKLLEDARRESEKLLRELKDLLRRAEELVKRDG

SEQ ID NO: 20824 - protein, 59 aa, Artificial Sequence
  Synthetic
EKVLDELRRELDKIREDLKKSHRELEELIKKIRTELDKSNRKLEELLKRIEERLDEMRR

SEQ ID NO: 20825 - protein, 61 aa, Artificial Sequence
  Synthetic
SEAEKVLEELKKLLRDLEETSKRVLREIRELLKEAREKSKRLLDRLRKLARDLKELVRRDG

SEQ ID NO: 20826 - protein, 59 aa, Artificial Sequence
  Synthetic
KEVLDRIKRLLEEIERELERSNKELEDLLRKIEEDLERSHRELEKLIREILKELEDARK

SEQ ID NO: 20827 - protein, 57 aa, Artificial Sequence
  Synthetic
DAEERLRKLLDDIRRELKRLTEETRKSLEKIKRDNDELEKKLRKLNEDSDRRLKEAN

SEQ ID NO: 20828 - protein, 59 aa, Artificial Sequence
  Synthetic
EKTIEDLLRELEKALRDLEKEVREINKELKRVLDEIAKTHEDLLKKHEELLRRVEERAR

SEQ ID NO: 20829 - protein, 57 aa, Artificial Sequence
  Synthetic
DLERELEKLLKDIKEELDKLIRTNEETLKEIEREVRKLLKRNKELLDRIREEVRKTG

SEQ ID NO: 20830 - protein, 59 aa, Artificial Sequence
  Synthetic
KEVVDRILKEARELLERIREENRRTLEDLRRILEDLRRRNKRHLDELRRVLKELRDKRK

SEQ ID NO: 20831 - protein, 56 aa, Artificial Sequence
  Synthetic
SLEERLEKLLKEIRETVKKNIEENRDLLRRVEEDLRRLTERNKRLLEKIRDALRKA

SEQ ID NO: 20832 - protein, 59 aa, Artificial Sequence
  Synthetic
EEVARRLMDDLRRLLEKIDRLSREHLERVRKILEDLRRLSEKHLKELEDLLREAEEEAR

SEQ ID NO: 20833 - protein, 56 aa, Artificial Sequence
  Synthetic
SLEERLEELLDEIRKMLKRLEDENRRLLKEIEKRVRENTRTNRELLKRIEDRIRKA

SEQ ID NO: 20834 - protein, 59 aa, Artificial Sequence
  Synthetic
EEVVRTLLRELEKILAEAEDLSRRHLERLRDILREAEDLSRKHLEELKKVLEELERRAK

SEQ ID NO: 20835 - protein, 57 aa, Artificial Sequence
  Synthetic
SDVERLLRELEDLLRRLEERIRELNKRHEELVRRLKEEVKRLSREHNEVVADVARKN

SEQ ID NO: 20836 - protein, 59 aa, Artificial Sequence
  Synthetic
KELRDRLRDVVRRLEDELRRLDDELRKNSEEVKKVLDDLRRHLEENSKRAEDTLRELRR

SEQ ID NO: 20837 - protein, 57 aa, Artificial Sequence
  Synthetic
SEVEKLLRELEKALEDLRRTNEKLDREHDAVVKEVKKIAKDLSREHRDVVEDVKRKN

SEQ ID NO: 20838 - protein, 59 aa, Artificial Sequence
  Synthetic
EELRDELRRVVEDVEKKLDDLRKRNEENSRKVKEVLEKLTRELDKNREEVERTLEELRR

SEQ ID NO: 20839 - protein, 57 aa, Artificial Sequence
  Synthetic
SEIEKLLEEIKESLERLKKTAEDLLEELRRLLEELERRVKELSDEHRRLVKELKDRN

SEQ ID NO: 20840 - protein, 59 aa, Artificial Sequence
  Synthetic
EELKKRVEDVLREIKRAHDDLRRRLEKILRDIEKTIEDLERHMKENHDDAERVIEELKR

SEQ ID NO: 20841 - protein, 60 aa, Artificial Sequence
  Synthetic
SEEEALERVLRELRRSLEELEEELRRAIRKLEDNLRRLREALETILKKLDDLLDDLRRRK

SEQ ID NO: 20842 - protein, 55 aa, Artificial Sequence
  Synthetic
DKLKKEADDLDRRSRKTIKEVLDEIKELDDRSNERIEEVIREIEDEARRLAREVD

SEQ ID NO: 20843 - protein, 60 aa, Artificial Sequence
  Synthetic
SEEERLREIRERLKKSLEDLKRELEEILRELERSLDKLRRDLERLLEDLRRLLDELRRRK

SEQ ID NO: 20844 - protein, 55 aa, Artificial Sequence
  Synthetic
EELEKKARELNERSKEKIKRLLEKLRKLDKESKDEIKRVLDKLRELAKRIKEEMD

SEQ ID NO: 20845 - protein, 60 aa, Artificial Sequence
  Synthetic
SEEERLRRVIEEYKRVLDELSERLKRLLDELRRSLKKLEEDLKRLLDELKRTLDELIRRV

SEQ ID NO: 20846 - protein, 55 aa, Artificial Sequence
  Synthetic
EELEKKLREALDTVRRLYEALIKKARELDKRSKDEIKRVVDKLKKLVRDIEERVR

SEQ ID NO: 20847 - protein, 60 aa, Artificial Sequence
  Synthetic
DDIEDVLRRIEKLIRDLRDHSRKLVEEIEKLIEDHTRHSRKLERDIKELLKRLRELRRRG

SEQ ID NO: 20848 - protein, 59 aa, Artificial Sequence
  Synthetic
EEVKKRLDEARRKAEKVVKESRDTLRELKDKVRENLDRSRKELKKLEEELEEVLREARE

SEQ ID NO: 20849 - protein, 60 aa, Artificial Sequence
  Synthetic
SDVERVAKTIEDLIREHTEHVKRSAERVERLIKEHTDHVRRSLTRIEDLLRRLEEMRRRG

SEQ ID NO: 20850 - protein, 59 aa, Artificial Sequence
  Synthetic
EDVERKARELERKVRENVRKVRDDHRKLEEKFRDNLRKVKREHEEAERKMRDLLREARR

SEQ ID NO: 20851 - protein, 60 aa, Artificial Sequence
  Synthetic
KDVDKVEEDIERLLADLRRHNEKLHRDIERLLEELRRHNDKLRKTLEDLLKKLKELAERG

SEQ ID NO: 20852 - protein, 59 aa, Artificial Sequence
  Synthetic
EDVKRRLEDLERKARRVLEESRKDLEEAKKKVDELMKRARDSLRELTRRLEELVRRIRK

SEQ ID NO: 20853 - protein, 60 aa, Artificial Sequence
  Synthetic
SEVEEVMKEIERLIEELRRHNEELARRLEELIKDHTRHNEELHKTIEDLIKELEDLARRG

SEQ ID NO: 20854 - protein, 59 aa, Artificial Sequence
  Synthetic
EEVEKRLRELKEKLDKVLDELRETLKRLEEKARENLKRSRDDLETIKRKLKKVMDEARR

SEQ ID NO: 20855 - protein, 59 aa, Artificial Sequence
  Synthetic
SDVERLIEELERLLDELRKKTEEIIRRIKKLIDELRRKTEEVIKRLEKLARDLTRLTER

SEQ ID NO: 20856 - protein, 59 aa, Artificial Sequence
  Synthetic
EEARRRIDEIRKKAEEVNKESRDRLRRLKEEVDKVDKDSKRRLDELREELRRLMEESKR

SEQ ID NO: 20857 - protein, 60 aa, Artificial Sequence
  Synthetic
DAARELRERLKKAIEDHRRLLERAARDVERLNKELEDILRRMAEDMKRSIEELKRVSEEG

SEQ ID NO: 20858 - protein, 56 aa, Artificial Sequence
  Synthetic
EKDLRRLEEEIRKEIRRSNETLKKLKKKTEDSLRTIKRRLEELHEEAKKVLDDLRR

SEQ ID NO: 20859 - protein, 59 aa, Artificial Sequence
  Synthetic
REDETLKRLEEENEEVNKRSEETLRKLLEDNRRLLERIEERLRELLEELRRLLEKIRKD

SEQ ID NO: 20860 - protein, 56 aa, Artificial Sequence
  Synthetic
KDELTERVKRHIEENKKLTEDVARKSEKHLRDLEELLERLRKLVEDLLRRLEEEAR

SEQ ID NO: 20861 - protein, 59 aa, Artificial Sequence
  Synthetic
SELEKVRKESERNLRSNEKLLRELDELSERNLDKLRRFVEEVRELVREMLERLDSVRRR

SEQ ID NO: 20862 - protein, 59 aa, Artificial Sequence
  Synthetic
EEVKRDVERNEKENKELLDRTRRKVEENAKRNKKLLEDIREDLKRLATELRRKLEEIRR

SEQ ID NO: 20863 - protein, 61 aa, Artificial Sequence
  Synthetic
DKEETVKDLERRYRDLLREIEKRLRELVRRNDKLLEEIKKAIEDLIRENEKKIKEIKERRG

SEQ ID NO: 20864 - protein, 55 aa, Artificial Sequence
  Synthetic
DELRRRAEEALERNKRLLEELKKENDDHLKRLKELLEELKKRNEDHLRRLDEEER

SEQ ID NO: 20865 - protein, 59 aa, Artificial Sequence
  Synthetic
KELEEIKRAVDESLKRAKELMDRHRREVEKSLEEMKRLAEDHKRRADRLLKELKRLADE

SEQ ID NO: 20866 - protein, 59 aa, Artificial Sequence
  Synthetic
DEVRRAVKELKDRHKELLDRIERESERLREEHRRLLEKIERTSEDLIRRLEKLIRDIRR

SEQ ID NO: 20867 - protein, 59 aa, Artificial Sequence
  Synthetic
DEVETVEEEVKKSLEELRDLARKHEKKVRESLKRLEESLRRSEEKVKDIIRRLEELKKR

SEQ ID NO: 20868 - protein, 59 aa, Artificial Sequence
  Synthetic
EEVKKRLEDLRKEHEDTLRDIERRSRELLKRHKDKVDEIRKAHERLIRELEEIARRIKK

SEQ ID NO: 20869 - protein, 59 aa, Artificial Sequence
  Synthetic
SEEEELKKKLEKSLDELRRSLKKSAEDVRRILEELKELMKRHKEVVEEIARELDELRKR

SEQ ID NO: 20870 - protein, 59 aa, Artificial Sequence
  Synthetic
EDVERSLRDLRRKHKELVDRIDEEHKRLEKELRDIIEEIERRSRKLLKELEDIIRETRR

SEQ ID NO: 20871 - protein, 59 aa, Artificial Sequence
  Synthetic
SLEEELKRVMKEVRDLAKEHSDRSRDVMREIRELSEENERRLRRVLEEAKRLADDLRRD

SEQ ID NO: 20872 - protein, 59 aa, Artificial Sequence
  Synthetic
ERLKDILRRIREDIERLLDELRKLNEKIKRDVDRLLKENKETLDDIERRIRKLLDDERR

SEQ ID NO: 20873 - protein, 60 aa, Artificial Sequence
  Synthetic
SVEELITRVERENERVARRDEELLRENEKRNRDVTREDRDLLKKLKEEVEEVLKRIREEG

SEQ ID NO: 20874 - protein, 59 aa, Artificial Sequence
  Synthetic
EETVKELVKHNEDLLRKWEKKSEDLSRKNEEALERWRRKSKKLAEELKKTLEDIRREVT

SEQ ID NO: 20875 - protein, 60 aa, Artificial Sequence
  Synthetic
DVEDKIRRLKERIKEVTERDRKLLEELKREAEEVLRRDKKSLEEVEREIEEILKDAERKG

SEQ ID NO: 20876 - protein, 55 aa, Artificial Sequence
  Synthetic
DELIREVEKVLEDWKRKVDELNRRLKKVLKEWEDTVRKLNEELKDVLDKLREELD

SEQ ID NO: 20877 - protein, 56 aa, Artificial Sequence
  Synthetic
DMEDKLRKIKEAIKKVLDEIRKLLEDIRRRLKRVREEIEEIHKRNEEENDRVKKEL

SEQ ID NO: 20878 - protein, 55 aa, Artificial Sequence
  Synthetic
DELIKKIRELLEELKDELRKLLEEAEEVLERLKRSVEELSRRNKKLVEDLDRKTR

SEQ ID NO: 20879 - protein, 56 aa, Artificial Sequence
  Synthetic
SVEEKARDILEKLKRVVEKIKEIADRNRRENEDADREIKRLIEENKKRNEDLLRRL

SEQ ID NO: 20880 - protein, 55 aa, Artificial Sequence
  Synthetic
DELIKRIKEIIETLEKEVEDLSRENKKKVEEILDKVRKVSTRNREKLDELDKKVR

SEQ ID NO: 20881 - protein, 61 aa, Artificial Sequence
  Synthetic
SDEEILRELEKRLEENVRRVEKRHEELEREVRDNLRRAEEKHRELEERVKRVIEEVIRTKG

SEQ ID NO: 20882 - protein, 59 aa, Artificial Sequence
  Synthetic
EEMVRKLVEDVDRLITDHTRSLEDVDRKVKDVIRRHTDSLRKVEEDVKRIIEELRKKAE

SEQ ID NO: 20883 - protein, 61 aa, Artificial Sequence
  Synthetic
DDEEILKKLREDVERVIKKIEDSLRELRKRLKDNVDRAEELHRRLEERAKKLIDEIIKKRG

SEQ ID NO: 20884 - protein, 59 aa, Artificial Sequence
  Synthetic
REFVRRLAERVKKLLKELEDRLRELEERVKEVITRHTRSLEEIVRRVERVLEEMERAAK

SEQ ID NO: 20885 - protein, 60 aa, Artificial Sequence
  Synthetic
SETEEAKKEIDEIIKRIEEETKRLRETYKRIIEEIERVSKRLEDEYRKLIEELERAKREG

SEQ ID NO: 20886 - protein, 55 aa, Artificial Sequence
  Synthetic
EELDKLRRRLEEILKRHEESNKKLSEDLERILEEHRRENERLHRELREILERLRR

SEQ ID NO: 20887 - protein, 56 aa, Artificial Sequence
  Synthetic
SIEDILRELEKELRESSKRSREILERLREELRDSSRRSEEILERLKRKVKRVKEEI

SEQ ID NO: 20888 - protein, 59 aa, Artificial Sequence
  Synthetic
DKRVREVAERLRRLNERYNREVKRLEKEARRLNEEYNRLVERLAREVEKLIRDLKEEAR

SEQ ID NO: 20889 - protein, 59 aa, Artificial Sequence
  Synthetic
SLEDLVREIRKRLDDMEREVKKVDDESRKRLDEARKRVEKINRESEKRLKEVADELSEL

SEQ ID NO: 20890 - protein, 59 aa, Artificial Sequence
  Synthetic
EKLARDLRREVRKLEKRLEELLKELKETTEKILRELERLLKKLEDDTRRVLEEIKELKR

SEQ ID NO: 20891 - protein, 58 aa, Artificial Sequence
  Synthetic
DEEREVKRKYREDLDDIRRHSEEVLKRYDEAVKKLDEDLKKVVEEYERALEEIVRRAG

SEQ ID NO: 20892 - protein, 56 aa, Artificial Sequence
  Synthetic
EEMSKDLERELRRSRRENERLAKELEDALRKSEEDIRRLVEENKERLERLERELSR

SEQ ID NO: 20893 - protein, 61 aa, Artificial Sequence
  Synthetic
SEAEKVEEEVKELVKRNREKHDEIRRRIEKLKEDLKRTSERSERKIKRLVEKIDDTLRKKG

SEQ ID NO: 20894 - protein, 59 aa, Artificial Sequence
  Synthetic
EDELKRMADTIRDEIRKDNERLRRTLEKAKREADEYRERDKRKLEDFEREIRRIEEETR

SEQ ID NO: 20895 - protein, 56 aa, Artificial Sequence
  Synthetic
DEREEIEKTIRELMRENDDLVRKIRREIEESLRENRRTLEKIKKEIEELTRKAKRD

SEQ ID NO: 20896 - protein, 59 aa, Artificial Sequence
  Synthetic
EETLRKRLEEVKRKSDEHKKELEERLREVRRRSERVNEELKKTLEEVRKKIRELIERDR

SEQ ID NO: 20897 - protein, 59 aa, Artificial Sequence
  Synthetic
SEEEVARRVEERVEELDRRLREIVKDLRDHNRRMKEKLEEAVERVRRRDKELDDILRET

SEQ ID NO: 20898 - protein, 55 aa, Artificial Sequence
  Synthetic
EELRKKLEDLRRKIDEKVKKVTKEHRDSAKKIRDDVRRVKEENKKANRELAEKRR

SEQ ID NO: 20899 - protein, 58 aa, Artificial Sequence
  Synthetic
SREEEVEEEYERLLEEIRRRVKEVEKEYRDLLKKIEDDVREVRKEYEKLVEDLSRKAG

SEQ ID NO: 20900 - protein, 56 aa, Artificial Sequence
  Synthetic
EDASRRLRDIARRSREELEEEVKRLRTEIEKSERELRETTKENRKIIEDVRRRLEK

SEQ ID NO: 20901 - protein, 58 aa, Artificial Sequence
  Synthetic
SEKEEVEREYRELLKEIEKRIDEVIKEYRDLLRDIRREVKRVLREYAELVKELKKTTG

SEQ ID NO: 20902 - protein, 56 aa, Artificial Sequence
  Synthetic
DEAARELRKKAEDSKRELEKLEEENRRIIKRSRERLKKIEEDNRRIIKEVLDRARK

SEQ ID NO: 20903 - protein, 59 aa, Artificial Sequence
  Synthetic
SKEELVKKARDELRRVLEELKRAVDELRKRDEDYERKSEDVVRRLRKIDKDVREVLRRG

SEQ ID NO: 20904 - protein, 55 aa, Artificial Sequence
  Synthetic
EEVEEEIRREAKRIDDELEKVEEENKRTLDRAKKHNEEVEKENRDTLREIDKERE

SEQ ID NO: 20905 - protein, 62 aa, Artificial Sequence
  Synthetic
SIEEEAKEIIDKVRKEVEDIVRRLKETNDEVRERLERILRRLEEVDEEAKRRVEELRERKRT

SEQ ID NO: 20906 - protein, 55 aa, Artificial Sequence
  Synthetic
DRLREELEKLARDVERRTRELEKHHRELMKRAKEETERLERHHDELAKRVREKLK

SEQ ID NO: 20907 - protein, 60 aa, Artificial Sequence
  Synthetic
DEIETVLDEVRRLHEDAKRRLEEMIDEVRKLNEESVRELARVVEEVERLLRTVKEEVERA

SEQ ID NO: 20908 - protein, 56 aa, Artificial Sequence
  Synthetic
AREALKESRKVVEESRESVRRVLEKNRRVVEESKRLAEELLRRVKKVVDEIRKRVE

SEQ ID NO: 20909 - protein, 60 aa, Artificial Sequence
  Synthetic
DELEEVVRRVRELSRTVKEELREVIERVRELSERVKKKLRKVLREVAELHREVMKRVRDS

SEQ ID NO: 20910 - protein, 56 aa, Artificial Sequence
  Synthetic
AEEVLREVEKVVEDSRRSAKDALKRVEDRVRESDKSVRELLEENRKVVEDIKRRVD

SEQ ID NO: 20911 - protein, 60 aa, Artificial Sequence
  Synthetic
EELERILDKVRKVIEEVRKRLRDDLRTVEKVLKETEEVLRRAAERAKRALERVEEAARRG

SEQ ID NO: 20912 - protein, 55 aa, Artificial Sequence
  Synthetic
REVLRKVRELLRTIREEVERVLRKSNELSTRIKKRIDDVLETLERLLKELDDKLR

SEQ ID NO: 20913 - protein, 60 aa, Artificial Sequence
  Synthetic
KDVEDVEREVDEVVKRSDDTVEENLRRAEDVVRDTDRIVKEMKERIDRVVERVEEVVRRG

SEQ ID NO: 20914 - protein, 55 aa, Artificial Sequence
  Synthetic
EEVLRKVTRLLREAKRRTEESHKKVNDLSRRVKERVDEVLERVKRLLEEVKRKVK

SEQ ID NO: 20915 - protein, 60 aa, Artificial Sequence
  Synthetic
DEAEKVLKESKDTVDKIRRDVERLVDESRKTVDRIRELVDKAVKDSKDSVDRLRDVMRRN

SEQ ID NO: 20916 - protein, 56 aa, Artificial Sequence
  Synthetic
EEVLRRIEKVNRDVARRVEEVFREAKEVNKKVDREVEDVIRKVKRVNEKVDEELKK

SEQ ID NO: 20917 - protein, 59 aa, Artificial Sequence
  Synthetic
SEAEEVVRRSRETVTRNVRMLEKVVRDSEETVKKIVRDVERLLEESKKSVDDLRRLKEE

SEQ ID NO: 20918 - protein, 56 aa, Artificial Sequence
  Synthetic
EKVLREVKEVNERVRETSRDIADRVREVNEDVKRKVKKVIDDIRRVNEKVKRELEK

SEQ ID NO: 20919 - protein, 60 aa, Artificial Sequence
  Synthetic
DEAREVVKRVKDLVRRLRRLSEKSLEDDKRLIEEVNKRSKDILDKVKKLVDDLRDMVRRT

SEQ ID NO: 20920 - protein, 56 aa, Artificial Sequence
  Synthetic
EEVIKEIERVVRKVLEESREVHERIRETVKEVNDRNRKVLREIREVVKKVFEDARR

SEQ ID NO: 20921 - protein, 59 aa, Artificial Sequence
  Synthetic
SDAEEVVRENRELVERIVREVEKILRDNEELVKRLVELVETSLRRNEKMVDELKKLVDR

SEQ ID NO: 20922 - protein, 56 aa, Artificial Sequence
  Synthetic
SRVIKEIRDTSKDAVRKVEEVLRRIEETVRDAERKVKEVIKRIRETSKEVLDRVRK

SEQ ID NO: 20923 - protein, 60 aa, Artificial Sequence
  Synthetic
DAAERALRRSEEVVRESVEEVKTWVDENRRSVERLREELRKDEERVRRVVERIRKLVEDG

SEQ ID NO: 20924 - protein, 56 aa, Artificial Sequence
  Synthetic
EEVLKRVRKTNDDSDKEVKRLIDEARKLNDDVRKEVEEVLERTTRILDRVRKEVEK

SEQ ID NO: 20925 - protein, 60 aa, Artificial Sequence
  Synthetic
DEAREVERRVREMVKELKRRLEEDVKESDKSVKDLERIAKEDVDRSRESVKELRDRVRRR

SEQ ID NO: 20926 - protein, 56 aa, Artificial Sequence
  Synthetic
EEAVRRVKRIIEEVRKVLEDVFRESERLNREVREKLKRMFETSKELNKRVEEALRE

SEQ ID NO: 20927 - protein, 61 aa, Artificial Sequence
  Synthetic
DSRRELEDDVRRIVETNRRLLEELERRVKKILEENRRLVEELRKENERIVRELTDRVRRDG

SEQ ID NO: 20928 - protein, 56 aa, Artificial Sequence
  Synthetic
EDVVRTVEKLIRDLEEESRRVLEEVRRLLDEVRKESEEVHKRVNEIVKRVEDEIRR

SEQ ID NO: 20929 - protein, 59 aa, Artificial Sequence
  Synthetic
SSKDEIRRRVEEVVERSDEIVKRSREHVKTVVDELDRVVKELERKVREVVKKLDKIRKD

SEQ ID NO: 20930 - protein, 56 aa, Artificial Sequence
  Synthetic
ERALREVEEISRKSEEKLRRVLKESEDIAKEAEDRLKTVLERVERIADEVLKRLTK

SEQ ID NO: 20931 - protein, 59 aa, Artificial Sequence
  Synthetic
SKVKEVEDRVREVVKESERVARESLEHVRRVVRKTEDVVRRLKEKVRKAVEDLKEIKRR

SEQ ID NO: 20932 - protein, 56 aa, Artificial Sequence
  Synthetic
EEVLKKVEEISERSRRELRRALKESDKISEESLRRLRKVLREVEEIVRRVLEELRR

SEQ ID NO: 20933 - protein, 59 aa, Artificial Sequence
  Synthetic
SKVEKLEEEIARLVERSRRLVEELKKEVTKVKEKVDEIVERSRRHVKKVVEKLRDIKRR

SEQ ID NO: 20934 - protein, 56 aa, Artificial Sequence
  Synthetic
EEVLRRVEETSDRSEKELRTVLRDVTEDIKRIAEELKKALEDSTEIIRRAEDELRT

SEQ ID NO: 20935 - protein, 61 aa, Artificial Sequence
  Synthetic
DSDRKIDDEVRKVVETSERSLRENIKRIEKVVRKLEEEVRKDLEEVRRVVKELREIVKRNK

SEQ ID NO: 20936 - protein, 56 aa, Artificial Sequence
  Synthetic
EEALRKVEEDLRRLDRRVEEVVTRSKEILDEARKSVEEVVRRSDEILRRVEEDLRR

SEQ ID NO: 20937 - protein, 60 aa, Artificial Sequence
  Synthetic
DEVEDILRKVEEIVKKSITDARRLLKEAREIVEESIKTAEELLRRNEDIVRKLSEDVKRT

SEQ ID NO: 20938 - protein, 55 aa, Artificial Sequence
  Synthetic
KRVLEKIKKVVDDSVRVNREVLKRVEEVLEESKRVNEKVEEDVRRVHEEVRKEIK

SEQ ID NO: 20939 - protein, 60 aa, Artificial Sequence
  Synthetic
DRVEKLLEDAKKIVEDSKRTAEKLLRENEKIVEKIKREADKILEDNKKIVDELAEAVKRT

SEQ ID NO: 20940 - protein, 55 aa, Artificial Sequence
  Synthetic
RRVLEEVKRVIDESRRVNKRVEEEIRKVHRDVERRLEEVLKRVRDTSEDVRRKIK

SEQ ID NO: 20941 - protein, 60 aa, Artificial Sequence
  Synthetic
SEAEKLLRDVEREVERVIEDADKLLREIEEIVKRSEDKAREILKENEKIVRELKEAVRRT

SEQ ID NO: 20942 - protein, 55 aa, Artificial Sequence
  Synthetic
EEVLRRIKKVVDDVRERLREVEKRIRDVIDRSRRVNERVLREAERTSREVERAID

SEQ ID NO: 20943 - protein, 59 aa, Artificial Sequence
  Synthetic
DEAEDVLRKVRERVKESERHVEKVLEDVRRVVKKSIDHARDVLRKVKEVIDRVRELVER

SEQ ID NO: 20944 - protein, 55 aa, Artificial Sequence
  Synthetic
ERVEREIRRVLKRSKERLEEVVKEIRELSEKSRRVLEEVKKRIREVLERVRKDVE

SEQ ID NO: 20945 - protein, 59 aa, Artificial Sequence
  Synthetic
REAEEVLKEVRKAVEDSIRHVEEVLEEVKKVVEESIRHIRDSLRDVRRVIEEVDRLVKR

SEQ ID NO: 20946 - protein, 55 aa, Artificial Sequence
  Synthetic
KRVKEEIDRVLDESKRVLEEVVTRIRKVSDDSEKEVRRVHKESKRVVEEVERTVD

SEQ ID NO: 20947 - protein, 60 aa, Artificial Sequence
  Synthetic
DEAEDVLRRVREMVERSIEHVRRVLKEVEDVVRESIKHVEDVVREVREVIREVEELVDRN

SEQ ID NO: 20948 - protein, 55 aa, Artificial Sequence
  Synthetic
KRVEEEIDKLLRESKRELDEVRKRIEDLSRESERRLREAVEEIRRLVKKVAEKVN

SEQ ID NO: 20949 - protein, 59 aa, Artificial Sequence
  Synthetic
KEAEDVLDEVRKAVEESIKHVKRVLEEVEEIVRRSIKHARDSLRKVKEVIDKVRTLVRR

SEQ ID NO: 20950 - protein, 55 aa, Artificial Sequence
  Synthetic
ERVRREIKRLLDESREVLKEVTKRIRKVSRDSERVVEKVHRDSKDVLDKVREDVR

SEQ ID NO: 20951 - protein, 57 aa, Artificial Sequence
  Synthetic
SSLEKAEDEVRELLRDVERVLKEVRDRIEELNRKVNEVLRRVIEESERLLREVLERV

SEQ ID NO: 20952 - protein, 59 aa, Artificial Sequence
  Synthetic
SEKVRRLVDKVRETVTDIVRRVTRLLEESEESVRRLIEKVKKLNEESRRIVEKIEKDAR

SEQ ID NO: 20953 - protein, 57 aa, Artificial Sequence
  Synthetic
SELERVEEDVKRVNKEVNDTLEKVIRDSKRVLDEVEERTRKVKRDSERLLERVERAV

SEQ ID NO: 20954 - protein, 59 aa, Artificial Sequence
  Synthetic
EEVVERVLEESRRSVETLIRDVERVNKKSREAVERNIRRSTAANERSKKIVKEIIDTAK

SEQ ID NO: 20955 - protein, 59 aa, Artificial Sequence
  Synthetic
DEAEDVVRRVREEVERLIRRSREVAEESKRTVDKLRRELEELLRRSRETVERIKKLIDE

SEQ ID NO: 20956 - protein, 55 aa, Artificial Sequence
  Synthetic
DKVREDIERVLREVEEVDKEVKERVRKVDEDSKKEIKEVKDEIRRVDEESRERAE

SEQ ID NO: 20957 - protein, 59 aa, Artificial Sequence
  Synthetic
DEAEKVLEKARDLVRRNIERSRRVLEENKKSVDDLIRRNEETNRRNEKSVDEVKKLVDN

SEQ ID NO: 20958 - protein, 55 aa, Artificial Sequence
  Synthetic
DDVLREVKRVLDEARRVSEEVEKESRRVLEEAKRVAEEVHKRSKKVVDDVKERAR

SEQ ID NO: 20959 - protein, 61 aa, Artificial Sequence
  Synthetic
SELEDVKRRIDKVVREVEEVVREVSERSKKVLEEVRRSAERVNREIERVLREAKDEVRRRT

SEQ ID NO: 20960 - protein, 56 aa, Artificial Sequence
  Synthetic
AKRVLEEARKIVDRLRKIVEEVVRRSEELIRRLKKINEDSLRRVEELVKDLIREVS

SEQ ID NO: 20961 - protein, 60 aa, Artificial Sequence
  Synthetic
KEAEEVVERVRELIERLRRRVTEMLRESKRLVEENIKRSEDALKESERLVDKLRELVKRT

SEQ ID NO: 20962 - protein, 55 aa, Artificial Sequence
  Synthetic
DKVLRTIEKLLDDVKKEVEKVNEDSKRLLRDVERVSKEVNDESRRVLEEVKREAK

SEQ ID NO: 20963 - protein, 59 aa, Artificial Sequence
  Synthetic
SELEKIVEKIKRIIDESRRTVEESVRKSEKIVEEVKKRLEELVEEVRKIVEEIVRIIRN

SEQ ID NO: 20964 - protein, 58 aa, Artificial Sequence
  Synthetic
EELEKVKRMVDKVVDDVRKVNDTSRKRSKETLEEARRKVEEVKRRIDKVLRDVKREID

SEQ ID NO: 20965 - protein, 60 aa, Artificial Sequence
  Synthetic
DEVEEVVKRVKEVVEKIVRELEKLVEESKKIVEDAVREDERLVEKIERVVRRLVEEVRRS

SEQ ID NO: 20966 - protein, 55 aa, Artificial Sequence
  Synthetic
EEVKKLVDEVVKEVEEVIKRVEDLDRRVLEENRESTRDVERRVREVVKRVREALK

SEQ ID NO: 20967 - protein, 59 aa, Artificial Sequence
  Synthetic
SDAERVVREVERLVDTTRKLVKKVVEDIRRVVETAKRDLDRVVKRSEDVVREVKKLIEE

SEQ ID NO: 20968 - protein, 55 aa, Artificial Sequence
  Synthetic
DRVIKLVRKLNKDSERKLREVRDRVERVIEEVEKRLREVKERSKETIEDVERARK

SEQ ID NO: 20969 - protein, 59 aa, Artificial Sequence
  Synthetic
DEAEKVVEEAKRRVKEVVERLREVADRNRRSIEELVKELRAVVEDSRKSVEDLVRRVRN

SEQ ID NO: 20970 - protein, 55 aa, Artificial Sequence
  Synthetic
EEVKKLVEDVIEEVRKVVKEVEDISRRVIEDLKRVLEEVEKRSRKLIKEARDETR

SEQ ID NO: 20971 - protein, 59 aa, Artificial Sequence
  Synthetic
DELREVVKRVRRLIEEVRRLVKELVDRVRKVIEELKRRSEDSARESERVVREIKKLVEE

SEQ ID NO: 20972 - protein, 58 aa, Artificial Sequence
  Synthetic
EELEDVDRDIERVREEVKRVVDEVRKRIRDVLEDARRESKRVLDRSRESLREVREAVR

SEQ ID NO: 20973 - protein, 59 aa, Artificial Sequence
  Synthetic
DELEELVKRVEDVIREIEERVRRLVRESERVVKEILKKSRKSVEKVKEVVDRAVDLVRK

SEQ ID NO: 20974 - protein, 58 aa, Artificial Sequence
  Synthetic
ERLKDVEREIRRVLRRAEKVVDEALKRSRDTLREVRKVSKEVREDIERVVKEADEAAR

SEQ ID NO: 20975 - protein, 56 aa, Artificial Sequence
  Synthetic
SVVDRVREELEKVLRHSKKVVEDVKREIDKVLKRSEDALRRVEEESKRVLEEVERD

SEQ ID NO: 20976 - protein, 59 aa, Artificial Sequence
  Synthetic
KDTLKKLVEEARKVSEDSRRRLERIVEEMRRVSEDSRRRLEEIVRENRKVVEEVRRRAT

SEQ ID NO: 20977 - protein, 56 aa, Artificial Sequence
  Synthetic
SVVERVREEIKRVLENSKRAVDKVREDIKRVLDESRKAIKEVEDEIRKVLEEVERG

SEQ ID NO: 20978 - protein, 59 aa, Artificial Sequence
  Synthetic
SDTVRRIVEEIEKVSRESVKRLEDIVREMKKISEESKETVDRIVEKIREVVKRLLEAAK

SEQ ID NO: 20979 - protein, 56 aa, Artificial Sequence
  Synthetic
SAVETVRKTIEDVLRNSERVLKKVREDSKKVLENSERVLKEVEDRSKEVLKEVEDG

SEQ ID NO: 20980 - protein, 59 aa, Artificial Sequence
  Synthetic
KKELDEIAEEIKRVSEDSVRKARELAERNKKVSDESVKRVKKIVRENEKVVEELLKAKK

SEQ ID NO: 20981 - protein, 60 aa, Artificial Sequence
  Synthetic
SEVDEIVRRIKEISKRSVDDLEKLARDNKKAVEEVLEELRKLLEENEKMVREVLEEVRRS

SEQ ID NO: 20982 - protein, 55 aa, Artificial Sequence
  Synthetic
ERLDRMLKEVIKHSEKVVRDVEETSKTVLKEIEDALKKVEEASKRVVDRLEEATR

SEQ ID NO: 20983 - protein, 60 aa, Artificial Sequence
  Synthetic
RRVDEIAKKIKRISEESVKTLDKIMEDARKIVKDVLDELRKLAEDNKRVVREVLERVRRS

SEQ ID NO: 20984 - protein, 55 aa, Artificial Sequence
  Synthetic
ERLRRTVERVIRHSREAVKRVKDEVEKVVKELEDVVRKVKEDSERVVKEVEEAKR

SEQ ID NO: 20985 - protein, 59 aa, Artificial Sequence
  Synthetic
SEAEDVVRRSKRSVERLKKELDDVVRESKESVERLVRRNDEVVKRSRESVDELTEAVKR

SEQ ID NO: 20986 - protein, 59 aa, Artificial Sequence
  Synthetic
KDLVERVERTVRTTLKELEDALREVKRMVEDTLKKAEDVNRRVAEEVKKSEKRLRDVAK

SEQ ID NO: 20987 - protein, 59 aa, Artificial Sequence
  Synthetic
DEVDDVVRKSEKSVEELVRKLETVVKRSEESVRELLEKNREVVERNERSVRELLERLEK

SEQ ID NO: 20988 - protein, 59 aa, Artificial Sequence
  Synthetic
KDLLKRVEDTARRVNREIEEALDRVRKAVEKTLKKLKDVNDEVRKESEKVLKELRDATK

SEQ ID NO: 20989 - protein, 61 aa, Artificial Sequence
  Synthetic
SDEDRVREMVRTVIEKLDRVLEEVERDSAKTDRDNKKSAEDVRRESKRTDDELKDVVRKAG

SEQ ID NO: 20990 - protein, 56 aa, Artificial Sequence
  Synthetic
VDEVVERAKKLVKRLEDRLREVVKESRRLVRRVVERNREVAERSKDLVRRLVEDTR

SEQ ID NO: 20991 - protein, 60 aa, Artificial Sequence
  Synthetic
SKEEEVERRVEEVIKELEEVLRRVEEEIKRVIDDNRRSARDVEEKSKRTDEELKDVVRKA

SEQ ID NO: 20992 - protein, 56 aa, Artificial Sequence
  Synthetic
VDEVARRVKEMVERLRKLAEEVVREAERVVREVVDENRKVVEESKRLVKELLERVK

SEQ ID NO: 20993 - protein, 60 aa, Artificial Sequence
  Synthetic
SDEERVDEEIKTVIEELKRSLKEVEDTIRKVIKENKDSAKRVKETSEKTDREIEDVVRKA

SEQ ID NO: 20994 - protein, 56 aa, Artificial Sequence
  Synthetic
VDTVAKEVRDLVRENVERNKEVVKRAKKVVDDVVRENRKVAEDSKKLVKEVKDRVR

SEQ ID NO: 20995 - protein, 61 aa, Artificial Sequence
  Synthetic
DDEERVKELIKEVIRELEESLRRVKEDSKRTDEKNKKSMEDVERKIERVRRRLDEVVKEAG

SEQ ID NO: 20996 - protein, 56 aa, Artificial Sequence
  Synthetic
VDEVAKRATDIVKRNAELNKEVVDESRRLVEEVVDRNEKVAKRAEEIVDELERRTR

SEQ ID NO: 20997 - protein, 60 aa, Artificial Sequence
  Synthetic
DEFKEVVDRVKRLVTENVRENRRVVEESERLVKEALKRLEDLVRRAKEIVDRLDDLVRKI

SEQ ID NO: 20998 - protein, 59 aa, Artificial Sequence
  Synthetic
KDLLKRVRDSIETVKKELDDSMKKVSDDDERSKKELEDVLEEVRKRIEKVMKELRDTSR

SEQ ID NO: 20999 - protein, 60 aa, Artificial Sequence
  Synthetic
DEVREIVREVKRLVEENVRRNDDVARKSRKLVKENKDRNKEVVDRLRELVKRALDEVRRI

SEQ ID NO: 21000 - protein, 59 aa, Artificial Sequence
  Synthetic
EKLLKEVEDMIRTVKKELKDSARRVSEEDKRSKEDLKRSAKEVEETIKDVLRKLDTETT

SEQ ID NO: 21001 - protein, 60 aa, Artificial Sequence
  Synthetic
DEAEEVVRRVERLVKENVKLNKEIVKRSRDLVKELEERLREIVKRVEEIVKRAKDLVEEI

SEQ ID NO: 21002 - protein, 59 aa, Artificial Sequence
  Synthetic
KDLLKRVREVIERVDRELDKSMKEVHDENEKSVRRLREVLERVKKRIKDVTKELEDRTR

SEQ ID NO: 21003 - protein, 60 aa, Artificial Sequence
  Synthetic
SLVEEVVRRVEDLVRKNVRLNEEIVRRSEDLVRRNVELNEELVRRAEDLVRRIEELVKKI

SEQ ID NO: 21004 - protein, 59 aa, Artificial Sequence
  Synthetic
EELLRKVEKMIERVVRELKKSAKRVHDENRRSDEDAERSMERVERVIERVERDIDRRLR

SEQ ID NO: 21005 - protein, 60 aa, Artificial Sequence
  Synthetic
DEAREVVTEVKRLVRENEERNKEVVKRSKKLVEDLKDLARKLVDRAKKLVDTLRDLVRKI

SEQ ID NO: 21006 - protein, 59 aa, Artificial Sequence
  Synthetic
ERLLEDVERKIETVIRELRKSMEEVKESSRRSNEELKKVADDVERTIRKVERELEKEST

SEQ ID NO: 21007 - protein, 60 aa, Artificial Sequence
  Synthetic
SDAERVVDDLERRVRENLEDLRRAVREVREVVKKNLETITRVLEEVERVVDRLSKLVKEG

SEQ ID NO: 21008 - protein, 55 aa, Artificial Sequence
  Synthetic
REVDKVLKDVARKVEEANEKSRRVLEEVEELVERVNRELHETLKRVAERVKRDAT

SEQ ID NO: 21009 - protein, 60 aa, Artificial Sequence
  Synthetic
SDEERVTKVLEEVKERIERANRTLEKRVREVTDRVREVNERSDKVNRDSERKIREIIKRL

SEQ ID NO: 21010 - protein, 55 aa, Artificial Sequence
  Synthetic
EKLVRDLRKIVEENERKNRDLLRKIEKIVEEIERRNRDVVRRSKESVERLREEVR

SEQ ID NO: 21011 - protein, 60 aa, Artificial Sequence
  Synthetic
DADRELRRVAKEVTDRSRRVLEDSERVVRESHEKSKRVLEDLRRVVKEVAERIDEVLKRV

SEQ ID NO: 21012 - protein, 59 aa, Artificial Sequence
  Synthetic
EEVARDVVRKLKRIVTENLKKNTKVVRDSEDLVRRDLEEVDRVVKKVKKDVDEIERDVK

SEQ ID NO: 21013 - protein, 59 aa, Artificial Sequence
  Synthetic
DEVREVVKELKRIVDELLDELRKVVEELEKIVTDDLRRIEEAVKRSKDSVEDLERRLKS

SEQ ID NO: 21014 - protein, 59 aa, Artificial Sequence
  Synthetic
KDLLRELEEVARRVEEKIKKAVRELEKVMREVNRKSTEVLKRLEKVVRDSEKRIDDATR

SEQ ID NO: 21015 - protein, 59 aa, Artificial Sequence
  Synthetic
SDVDEVVKEVKAIADDSTRLNKESAEKSRELVDRDTKKNKRSVEELRRLVTEILKVVES

SEQ ID NO: 21016 - protein, 59 aa, Artificial Sequence
  Synthetic
DELLRKLEEVVEKVRRDDERSHRESERVSRESTKRSRDSHRESREVVTEVKKEVDRAAK

SEQ ID NO: 21017 - protein, 60 aa, Artificial Sequence
  Synthetic
DEAEEVVDRARKLVKESEDLNRRSVEESEKLVTTSTELNKRTVDRLREIVEEVKDLVRKT

SEQ ID NO: 21018 - protein, 59 aa, Artificial Sequence
  Synthetic
EDVLRKVKKTLEEVKRRDDEAMRRSHKKDDDSRKRDEESMRRSDEVVREVIEEVREAER

SEQ ID NO: 21019 - protein, 59 aa, Artificial Sequence
  Synthetic
DEIEDVVRKVEEMVKESKDRVDRNVEESRRIVTESREKVKDSVRRVEEVVKEIKKLAEQ

SEQ ID NO: 21020 - protein, 59 aa, Artificial Sequence
  Synthetic
DKVVKKVDDALKRVEKKDRDAIREVERVNREVEKDDERVLRDSERVLEEVRKRVEEVTT

SEQ ID NO: 21021 - protein, 59 aa, Artificial Sequence
  Synthetic
SEIDEVVERVRKAVEDSRKVVEDLIKTVEDAVREHERLVRRVVEEVDKLVEDIRKLLER

SEQ ID NO: 21022 - protein, 59 aa, Artificial Sequence
  Synthetic
ERMLRKVDEVIKRVAREDERVVKKLEDVLRDVKRRVDEASKEVDRRLKEVKKRVEKEAE

SEQ ID NO: 21023 - protein, 59 aa, Artificial Sequence
  Synthetic
KEAEEAAKRAEEAAKRHEDLAREAAKEAKRAADESRKAAEEAAKRAEKAARDIADLARK

SEQ ID NO: 21024 - protein, 59 aa, Artificial Sequence
  Synthetic
EKAARKAEDALRRAREIAKKASEDAKRALDEARKADEDAARKAEKALKEAEDAAREARR

SEQ ID NO: 21025 - protein, 63 aa, Artificial Sequence
  Synthetic
DEEEELKEVVREVAERVEEVNRKSERELDKARKDSERALEKLERVLREVAERVKRVLDEASKR

SEQ ID NO: 21026 - protein, 56 aa, Artificial Sequence
  Synthetic
VKDVIRELEEVVRRNTDLVRKVEEEIRKVVEESKRSIEEVIKRLRKLVDDIRKAIK

SEQ ID NO: 21027 - protein, 63 aa, Artificial Sequence
  Synthetic
DEREKLAEVVKRVAEDVKRMNKESREALKRVKEEVKRVNEKSEKVTREVKKEVERVIEEAKRT

SEQ ID NO: 21028 - protein, 56 aa, Artificial Sequence
  Synthetic
VEDVIRELEKVVEDNKRLVEKVVRDARKVVEDNKELVDRNVKRLEEVVREITKEIK

SEQ ID NO: 21029 - protein, 60 aa, Artificial Sequence
  Synthetic
RDVDELVRELRDVVRKVLETARDSVRELKRIVTESLRRAEDLVKEITDVVREVLDAVRRA

SEQ ID NO: 21030 - protein, 59 aa, Artificial Sequence
  Synthetic
REVVKKLRDVIREVKEDVERVLKEVRDVNREVNKIDKEAVERIRRVLDEVRKRVDEAAR

SEQ ID NO: 21031 - protein, 59 aa, Artificial Sequence
  Synthetic
KEIDDVVRELKEIAKRDEDKVRRVVEDLERVAREDLRKVREVVKELRRVVKTLLDLVRR

SEQ ID NO: 21032 - protein, 55 aa, Artificial Sequence
  Synthetic
KRLDDVLREVADIIRRSIRDLERVLEEVKRIIETSNDELRKVLKEVRETITEAER

SEQ ID NO: 21033 - protein, 60 aa, Artificial Sequence
  Synthetic
SEIDEMVRKLKEMARRDLETVRRVVERLRKLAEDDLRRVRKVVKKLKELAKDIVRLVEEG

SEQ ID NO: 21034 - protein, 55 aa, Artificial Sequence
  Synthetic
ERLRKVLKEVKDIIRKSNKELDEVLRDVERIIRESIEELRRVLEEVKKIIKEARD

SEQ ID NO: 21035 - protein, 59 aa, Artificial Sequence
  Synthetic
DEVDEAVRRLEEIVTRIEKDVDDVARRSEESAKEVEKAVRKVVEEHKKVAEDIRKLVED

SEQ ID NO: 21036 - protein, 59 aa, Artificial Sequence
  Synthetic
REVKERLKKVLDKVRKRIKRVVERLEEAARKSRKIIRDAKEELERVSREVEKVIRDVRR

SEQ ID NO: 21037 - protein, 60 aa, Artificial Sequence
  Synthetic
EEVKELVERLRDLVRESEKRVDEVVKRLEDLVRRNEELNRELVTRLRDLVRKLEEKVKDT

SEQ ID NO: 21038 - protein, 59 aa, Artificial Sequence
  Synthetic
KEMVREIKRVVDEVRKRDKEALDRLKKVIEEVRRKVKRSEDEARRVVEEVKRIVDRVET

SEQ ID NO: 21039 - protein, 60 aa, Artificial Sequence
  Synthetic
REVDDLVRRLEELVRRNEKKNEDVVRESKELADRSRKLVKELVKRLRELVKTVVRLVEET

SEQ ID NO: 21040 - protein, 59 aa, Artificial Sequence
  Synthetic
KELVRKLKKVVDEVRERIDRSTEEVRRVSKESKDIDKRAKEEIEEVLRDVEKKLRETAT

SEQ ID NO: 21041 - protein, 60 aa, Artificial Sequence
  Synthetic
DEFRDVVRKLEKLVEDITREAEEVVKISKALAEENKRLNDELVDRLRRLVEEVRKKVEDT

SEQ ID NO: 21042 - protein, 59 aa, Artificial Sequence
  Synthetic
KEVVKRVKDVVDRVRDEVRRVAEKVDRVSKESKRIIDESTKRAREVLERVRKRVEDERK

SEQ ID NO: 21043 - protein, 60 aa, Artificial Sequence
  Synthetic
SEVDDIARKLRDLVRRNKELNDEVVRRSEKLVKENKELNEELVRRLKELVDRLEDEVRRT

SEQ ID NO: 21044 - protein, 59 aa, Artificial Sequence
  Synthetic
KEMVKKLRKVVEEVRREIDDSMRKVKKVSEDSKRRIERSTEEIEEVAKRVADKVTDVER

SEQ ID NO: 21045 - protein, 60 aa, Artificial Sequence
  Synthetic
RELEEVVRELRKLVTEDLDRVRKSVEESERVVREDERRVDESVKRTREIADEVRRLKEEG

SEQ ID NO: 21046 - protein, 55 aa, Artificial Sequence
  Synthetic
EELKKVLKEVRKVVTDSERRDKEANRKVEEVIRRSKKKDEDAHREVRKVVEDVRT

SEQ ID NO: 21047 - protein, 60 aa, Artificial Sequence
  Synthetic
SKDEKLEKVIREVKRVIERVSKESEDVLRKVRKVIEDVSRESRRVLEDSRRVLERVAREG

SEQ ID NO: 21048 - protein, 56 aa, Artificial Sequence
  Synthetic
VDEVVDRARRIVDDVDRLNREVVKRLKDLVEDLRRLNEEVVRRNKELADTVRKDVR

SEQ ID NO: 21049 - protein, 60 aa, Artificial Sequence
  Synthetic
SEDEKLKEVVDEARKILEDADRELKRVVKEVEDVIRDVSKKSTEVRKEVKEILKEAADKG

SEQ ID NO: 21050 - protein, 56 aa, Artificial Sequence
  Synthetic
VDKVVDDLRKLAEDLLRENKEVVDKLRELVERVKKLNEDVVREARRLADEVLKRVT

SEQ ID NO: 21051 - protein, 60 aa, Artificial Sequence
  Synthetic
SEVERLEERLKRIVEDIKRLVKKSVEDSRKIVEEIRKLVKDSVEKNKRSVEEVEDIVRKD

SEQ ID NO: 21052 - protein, 55 aa, Artificial Sequence
  Synthetic
ERVKRVLREVEERVKEVKKENEKAHEEVRKDVERVLEDDDRALRESRERAERVKK

SEQ ID NO: 21053 - protein, 60 aa, Artificial Sequence
  Synthetic
TEVDELLDSLRKIVTEIEKLVEESEKRLREIVKTIEKLVKDSVRTLKKIAREIEELAKDR

SEQ ID NO: 21054 - protein, 55 aa, Artificial Sequence
  Synthetic
ERVEKVLREVRDRVKKVNKRNEDALREVDKKVKDVNKENEDVLEEARRVVEEVRR

SEQ ID NO: 21055 - protein, 60 aa, Artificial Sequence
  Synthetic
REDEKIKKVVEEVRKKLEDVDKNSRDAIEDDKRVNKEVDRNSERAFKENEDEIRKVKEAG

SEQ ID NO: 21056 - protein, 56 aa, Artificial Sequence
  Synthetic
ADEVVKELERIVAEVEKLSREVVKRLKENVKRVRDLSKRVVEYLKEDADRLKEDVR

SEQ ID NO: 21057 - protein, 59 aa, Artificial Sequence
  Synthetic
DEERKIRKAVEDVRRVIKEVEENSKRVFDENKKVIDDVRKEVEKVLKENRDVIKEVRDK

SEQ ID NO: 21058 - protein, 56 aa, Artificial Sequence
  Synthetic
ADEVLKELKKLVEELEKLSREVVKYLREDAKRLKDLVRKVVEYLKEDARRLDEEVR

SEQ ID NO: 21059 - protein, 57 aa, Artificial Sequence
  Synthetic
SVVEKLLEDARRVVEKVREAVERNLKKVRDLVKKLREDVKRSKDHLEEVVRKLEEAK

SEQ ID NO: 21060 - protein, 59 aa, Artificial Sequence
  Synthetic
EEVERRVEEVIRDLERVLREVRERVRRINEESRRMLEDVERESRKALRDLEEVLDRVRR

SEQ ID NO: 21061 - protein, 58 aa, Artificial Sequence
  Synthetic
SVVEELRKRVEDVVDEVREVVERNRDLMRRVAEESKKIVDDSLRHIKEVVDEVRRAKN

SEQ ID NO: 21062 - protein, 59 aa, Artificial Sequence
  Synthetic
ERVKKRVRDVLRKLREVLERVAEEVKKVNKRSREVNKRVEEKSEEVLRDLERVLREVET

SEQ ID NO: 21063 - protein, 59 aa, Artificial Sequence
  Synthetic
SEVEEVVERLRRKAEEDLRRVEEAVKEHRRVVKEDLDRVRDAVERHREVVETIRKLKED

SEQ ID NO: 21064 - protein, 55 aa, Artificial Sequence
  Synthetic
EKLKRVLKEVEEVVRESKERLREVHEEVRKVIEDSKRILKTVHDDVRRVIEEVKK

SEQ ID NO: 21065 - protein, 59 aa, Artificial Sequence
  Synthetic
DDVERVLKELDELLKRDETEVREVEKRHREVLETIERRVREVIERHKEMLRRLAELVRS

SEQ ID NO: 21066 - protein, 55 aa, Artificial Sequence
  Synthetic
EELKKVRDKVRRVIEESKRRLEELHEEIRRLITELKRRLEEVTEEIKRAIDELRR

SEQ ID NO: 21067 - protein, 59 aa, Artificial Sequence
  Synthetic
DEVEDVVRRLRKIVEDIRRDVERVVEEHDRVVRKLKRRVEEAVEEHRKVLEEIKKVKEN

SEQ ID NO: 21068 - protein, 55 aa, Artificial Sequence
  Synthetic
EDLKRVLKEVEDVVREVDKILTDATERVKRVITEVKDILRRVHEEVREVIKRVKE

SEQ ID NO: 21069 - protein, 59 aa, Artificial Sequence
  Synthetic
DEVEEVVRELREILKRDLDEVRKAVEDHERLLREITKDVKRVADRHRDLLRKIRELKEN

SEQ ID NO: 21070 - protein, 55 aa, Artificial Sequence
  Synthetic
EKLKRVLKELEDVIRESEEILERVTRKAERVIERVRKILEEATKEVERVIREVRR

SEQ ID NO: 21071 - protein, 55 aa, Artificial Sequence
  Synthetic
EEDERIEKVTEEVKKVIEDVTRLTETVMRESEKVIEDVTRDSDRVRKEVKKVLEK

SEQ ID NO: 21072 - protein, 56 aa, Artificial Sequence
  Synthetic
VDEVVKRLKELVTRLAEENKRAVDTNRKLAEDLKELNRKAVEELKELLRRVDERDR

SEQ ID NO: 21073 - protein, 56 aa, Artificial Sequence
  Synthetic
SEDEEIDRVDKDVKRVSDTSNKILDDVEKEVDKVIREVTAESKKVLDEAKKVLDKV

SEQ ID NO: 21074 - protein, 56 aa, Artificial Sequence
  Synthetic
VEEVVRRLEKLVDDDRKLVEKVVKELRELLKELRDKNKEVVDELRRLAKTVDEEDR

SEQ ID NO: 21075 - protein, 60 aa, Artificial Sequence
  Synthetic
SAEEIAERVLRELRKVTKEVAEEDERVLREDEKVTDEVRKEDKRVLDEARKVIDDVRKKG

SEQ ID NO: 21076 - protein, 55 aa, Artificial Sequence
  Synthetic
EEVVKRVRENVKRTRELSKRSVEKNEENVRRTREMSKRTVKEIRDVVKELRDRVK

SEQ ID NO: 21077 - protein, 59 aa, Artificial Sequence
  Synthetic
SKREKAEEVLKEAKKVIDDVREKDRRALEEDKRVTDEVARIAEKVLKDLRDVIEEVRER

SEQ ID NO: 21078 - protein, 55 aa, Artificial Sequence
  Synthetic
EEVVRRVRKVVTELEELSRRSVEENRRNAEETERLIREIVERARRVVETLKETVR

SEQ ID NO: 21079 - protein, 59 aa, Artificial Sequence
  Synthetic
SVEDILRKVAKEAEDVAREVTRILEEANRRVEEVVKRVKEENERANEKVERVVREVKAR

SEQ ID NO: 21080 - protein, 59 aa, Artificial Sequence
  Synthetic
EEVVRRVVETVKDIVKRLRDIVREVLKKNERIVEELKKTSDESKKRNDDIVRELDERAR

SEQ ID NO: 21081 - protein, 59 aa, Artificial Sequence
  Synthetic
SVEEILEEVLRRAEKIVKEVKDLDRRALEENKKAIKEVADELRKVDEEVKKVVDEVRRE

SEQ ID NO: 21082 - protein, 59 aa, Artificial Sequence
  Synthetic
EDVVRKVVRDVEDIVRRMREEVRRSVEDLKRNADENRDEVRKVVKENKDIVREMRERVR

SEQ ID NO: 21083 - protein, 59 aa, Artificial Sequence
  Synthetic
REKEKLEKAVRDARRVIERVERKDREALKEVERVVRESHKTLEDVLREIRKVATEVRRE

SEQ ID NO: 21084 - protein, 56 aa, Artificial Sequence
  Synthetic
VDKLMKTIEDLLRRVEELVDRSVKELKRLLDENRKLVKRVLEEIRRILKELRDEVK

SEQ ID NO: 21085 - protein, 59 aa, Artificial Sequence
  Synthetic
DEEEKLRKVKKEADDVIRRSHEEDERVLREVEKVVRESHEELKRVADEIRRVVEEVKTR

SEQ ID NO: 21086 - protein, 56 aa, Artificial Sequence
  Synthetic
VDKVMETIRRLVTKNRELVKRSVDELRDLVDKNRKLVERVVERIEEIAKKARDDVK

SEQ ID NO: 21087 - protein, 60 aa, Artificial Sequence
  Synthetic
KVVEEIEKEVRRSVEELERLVTEDLRKVKEVVKRAEEVAEEDERKVDEVVKELKRAAKEG

SEQ ID NO: 21088 - protein, 59 aa, Artificial Sequence
  Synthetic
EEMERRVREVLKRNEDVTDEVKKKIEESNRDLEDALRKVEKKIRESNERLRRVLEEVRK

SEQ ID NO: 21089 - protein, 60 aa, Artificial Sequence
  Synthetic
KEVEDVLDDVRRVVEKLEREVKKVEDTNERVVETLDEIVKEIRDRNRKVVETLKEIMKSN

SEQ ID NO: 21090 - protein, 55 aa, Artificial Sequence
  Synthetic
DKLRKAEKDLRDVAKEVRDKIRRADERLKRVIERVADEIRKVNTDLKRVADEVRK

SEQ ID NO: 21091 - protein, 60 aa, Artificial Sequence
  Synthetic
SEVEDVEREIEEVVEELRKIAEDDLRRNDTVVKEVRELVKRDREKNRKSAEELKKLKEEG

SEQ ID NO: 21092 - protein, 55 aa, Artificial Sequence
  Synthetic
EELKRVMEKITRVVEKVKEDVDRSKKKAEEVIREVEERLKRSLDESRKVLEEVKK

SEQ ID NO: 21093 - protein, 59 aa, Artificial Sequence
  Synthetic
REVEEVKKRVDEVVKRLRKLAEDDDRKNKESADRLRAIVDRDKKENTRSMETLRRLRER

SEQ ID NO: 21094 - protein, 55 aa, Artificial Sequence
  Synthetic
ERLEDAKKKLEDVIDEVRRRLEESNKRSRDVMEEVRKEVRRSLRESEEVVKDVEK

SEQ ID NO: 21095 - protein, 60 aa, Artificial Sequence
  Synthetic
DEVREIKRLVDELVKRLKELAERSRRLVDEVAKRSKELAKENLDLNEDIVRRLDEVAKRG

SEQ ID NO: 21096 - protein, 55 aa, Artificial Sequence
  Synthetic
KELKDVAREIERVLKEVEEEDDDALRKIEEVSKRSKEIIDESMEKVKKVMEDVTR

SEQ ID NO: 21097 - protein, 59 aa, Artificial Sequence
  Synthetic
SEVETVKKLIEDIVRESRRLVRENEELNKDVIRRSEELVRRSKEAVKRLVDKLDELRKR

SEQ ID NO: 21098 - protein, 55 aa, Artificial Sequence
  Synthetic
RELERAVEEIERVSRDSKREIKRSTEEVRKASERSRKEDEELERRARRVVEEVKR

SEQ ID NO: 21099 - protein, 59 aa, Artificial Sequence
  Synthetic
SELEKVVEEVEEIVRRSERHVTEVVKTSKKSVEDSNRHVAKVVEDVKKKVTELIEAARE

SEQ ID NO: 21100 - protein, 55 aa, Artificial Sequence
  Synthetic
KVLERVKRELKKAADRSRDIIRRVARETEEALRTSREIAKRVEDELRRVLEEVRK

SEQ ID NO: 21101 - protein, 59 aa, Artificial Sequence
  Synthetic
KELEDVVKRVREEVRRSLEHVAKAVKESEDSVRELKEEVDRVVKESEDIVRELEKLKRE

SEQ ID NO: 21102 - protein, 55 aa, Artificial Sequence
  Synthetic
KRLKEVDKELKRALEESRKIIKKVKEETKDVLRRVRDILRRSVRTSEKVLKEVKD

SEQ ID NO: 21103 - protein, 59 aa, Artificial Sequence
  Synthetic
SKVERVVEESRENAKRDLDRVDKVVKDSRRSVEEDLKEVRDVVKEVDDMLREAEELMRR

SEQ ID NO: 21104 - protein, 56 aa, Artificial Sequence
  Synthetic
EKVIREVAKESEDAFRESERRLREVLKRSAEALKRSRDILKTVRERVKRVIDEVRR

SEQ ID NO: 21105 - protein, 60 aa, Artificial Sequence
  Synthetic
REVEEVVKRSEKSVKEMEDKSRETVKKSRKSAKEDIDKVEEVVRRVEKVLREAKKLADDG

SEQ ID NO: 21106 - protein, 56 aa, Artificial Sequence
  Synthetic
KDVIEEVRKKSDEVLKRVRKINKEVTEESERAFDESRRILETVAREVKRVIDEVRR

SEQ ID NO: 21107 - protein, 59 aa, Artificial Sequence
  Synthetic
DAVEREVRKAEKIVEDDLRRVAKVVDESRKSVEKNEEDVRRVVEELRKILEEIDRLKRN

SEQ ID NO: 21108 - protein, 56 aa, Artificial Sequence
  Synthetic
ERVLRRVKKKLEDAVEDSRRILTELAEEVKTVVERSKRILDTVRDELKKALERVKK

SEQ ID NO: 21109 - protein, 60 aa, Artificial Sequence
  Synthetic
DEVDEVVEKLRRLLEDTIRLVREAVDYLRRNLEDLRRKIREIVERLKRLLEELRKLVKDT

SEQ ID NO: 21110 - protein, 56 aa, Artificial Sequence
  Synthetic
EKRVRDAADEVRRMNEEVKKIIDDARKELERVHRDVKREIDRVARELDEEIRRVEK

SEQ ID NO: 21111 - protein, 60 aa, Artificial Sequence
  Synthetic
DEVREMVKTLTDLLRRNRELVKRVVEELRKLLEETRKLVEDMVKELEDLLRELEKLARDT

SEQ ID NO: 21112 - protein, 56 aa, Artificial Sequence
  Synthetic
EKVVEEVARKVARANEDSNRILDEARKEVEKVNEEVRRIIKEVTDRLEKKVREVEK

SEQ ID NO: 21113 - protein, 59 aa, Artificial Sequence
  Synthetic
SKAERLDEEVDKIVRDLRRLVDELEKRIEKIVRDNRELVKRVRESNKRIVETLRRLKEN

SEQ ID NO: 21114 - protein, 56 aa, Artificial Sequence
  Synthetic
KREVDKIEKKLRDVVREVEEIVTRVDKRLKDVLKESREILKEVNDETKKVLDEVKT

SEQ ID NO: 21115 - protein, 59 aa, Artificial Sequence
  Synthetic
SEAEKVVRDVREIVERLRDIVRKVVEENEEIVKRLRKLVTDLVEENKRTVEALRDLKRR

SEQ ID NO: 21116 - protein, 56 aa, Artificial Sequence
  Synthetic
EEILRRVEEEARRAAKEVEERIRTVNRRTEKVLEEVRKIVKDATDTSEKALREVRE

SEQ ID NO: 21117 - protein, 59 aa, Artificial Sequence
  Synthetic
SRVEEVLRKVEEIVKRNEDLARKVVDESRKTVDKLRTLVEKVLRESRETVKRLIDLVRR

SEQ ID NO: 21118 - protein, 56 aa, Artificial Sequence
  Synthetic
EDLLTRVTDVLRKLRDRSREIIKRVVDETRRVLEEVKELIKRVLEETERVLREVRR

SEQ ID NO: 21119 - protein, 59 aa, Artificial Sequence
  Synthetic
SEVDEVVDRSRKTVKKMIDDVREVLERSRKNVKEDIERVRKVVRESEETVKTARRLKEE

SEQ ID NO: 21120 - protein, 56 aa, Artificial Sequence
  Synthetic
EEVLRRVREVTERATREVEELLKRSDEESERALKTSTDVLREVLERSDKVEEEVKT

SEQ ID NO: 21121 - protein, 60 aa, Artificial Sequence
  Synthetic
KEVEEAVRRVEESVRRLEEEVDRVVKENRKLVKDLIELAEEVVRRVKELVDRLRETVRRA

SEQ ID NO: 21122 - protein, 56 aa, Artificial Sequence
  Synthetic
KDVVTEVKKRAEDVDRRVERVIEEAEEVSREALKRVRDIIDTVRKVAETVLKEVKD

SEQ ID NO: 21123 - protein, 59 aa, Artificial Sequence
  Synthetic
KEKEVMDEVERVLEKVKEDNRRVVREVEDVLRRVEKENKEIVDEVKDVARKVLEEVRRR

SEQ ID NO: 21124 - protein, 55 aa, Artificial Sequence
  Synthetic
ERVLEKVKDVVRRSRDIVRRILEDAKDVVRKSREIAKKILEEVTEVVKRAREKVK

SEQ ID NO: 21125 - protein, 60 aa, Artificial Sequence
  Synthetic
SKLEELLKRSEKSVREAKRLVEELKRRSEETVRRNKELAERLEDESRKTVELLKRIVDSN

SEQ ID NO: 21126 - protein, 55 aa, Artificial Sequence
  Synthetic
KLLEEVEKESRKVVEDVRRVIEDVKRRSDEALKESEDIIRDVRRKSEKALRDVEK

SEQ ID NO: 21127 - protein, 60 aa, Artificial Sequence
  Synthetic
SELEDLLRRSKESVDRLRELIRRLEDESRKTVETLRDIVKKLKEENKKTVDDLRDIVRRR

SEQ ID NO: 21128 - protein, 55 aa, Artificial Sequence
  Synthetic
ELLERVREVSDKVLEELKKIIDEIRKRSEKVAEEVKDVIRKVNELSKKVLKDVKK

SEQ ID NO: 21129 - protein, 60 aa, Artificial Sequence
  Synthetic
RKLEELLKRSERSVEELRRKVTRLLEENDDTVRRLRELVTKLTDDSRKTVTRLRDIVRKD

SEQ ID NO: 21130 - protein, 55 aa, Artificial Sequence
  Synthetic
KLLEEVTKVSEKVAEEVRRVIKTVNDKSTEVLREVKRVIETVRRESEDVLEKVEK

SEQ ID NO: 21131 - protein, 60 aa, Artificial Sequence
  Synthetic
SKLEDLLRRVTEIVKRLEEIVRKLEERSRRTVKRLEELVDTLRKENEDTVRRLEKIVRDR

SEQ ID NO: 21132 - protein, 55 aa, Artificial Sequence
  Synthetic
ELLKEVRDVLETVVKRVREIIEKVRKESEDALRKVDKDIREVNRRSEKALEDVKT

SEQ ID NO: 21133 - protein, 59 aa, Artificial Sequence
  Synthetic
SEAEKIEREVDKVVEDHRRLVRADLERVERVVEEHRRLVKEDLDRVDEVVKRLRKLKED

SEQ ID NO: 21134 - protein, 56 aa, Artificial Sequence
  Synthetic
EDVLRRVRELLKTVHEEVKKVIKTSDDILRTVHDEVRKVIKTSEKILREVAEEVER

SEQ ID NO: 21135 - protein, 59 aa, Artificial Sequence
  Synthetic
KELEDATREVETVADEHRRVLEEDKRDVKEVVERHRRLLEDLRRKLEKVVRDLRKLLKD

SEQ ID NO: 21136 - protein, 56 aa, Artificial Sequence
  Synthetic
EDVLRRIEKKLKDVTDDLRRVIKESKDRLTKLHKEVEDALRRLRDRLRELEDEIRR

SEQ ID NO: 21137 - protein, 61 aa, Artificial Sequence
  Synthetic
RELEEAVKEVEKKIRELRERLKEVVERSTKKMDDLRKENEKVMRESSELVTELVKEIKDRA

SEQ ID NO: 21138 - protein, 56 aa, Artificial Sequence
  Synthetic
LKDLRKKVDDVARKVDKILEDLERESDTVLDRVKKVLERSRRDSEDVARRVEEKVR

SEQ ID NO: 21139 - protein, 60 aa, Artificial Sequence
  Synthetic
SELDELRKMVKEVLDRVRDLLKKLEDEARKVAEDNKRLLERNKREIEAALRRVEEIIRRR

SEQ ID NO: 21140 - protein, 58 aa, Artificial Sequence
  Synthetic
KRVREVLREVEKRIKELEDLVRKVLDKIRELIERLKRETDKVLEESKKLIKELSERLE

SEQ ID NO: 21141 - protein, 59 aa, Artificial Sequence
  Synthetic
DELEDVRKEIEDVRKENEDTVRESKDEIRRLEDTNRKTLKESRDDIEKARERVKKERRD

SEQ ID NO: 21142 - protein, 59 aa, Artificial Sequence
  Synthetic
EKDVRKVLKEVEEEARELVKLNRDVLEELRRRVRKLVEDNKDVTREVEDILKKLEEELK

SEQ ID NO: 21143 - protein, 57 aa, Artificial Sequence
  Synthetic
SMDETIRKLAEDNRRRSDETVERIERLAKKLDEDNRRVVEKSERLAKEVADKVRRVK

SEQ ID NO: 21144 - protein, 55 aa, Artificial Sequence
  Synthetic
ERVIKEVEDISRDLERKNKEVVERARRIVEKVKETNKRVLEEVEKIVRKLKEELK

SEQ ID NO: 21145 - protein, 60 aa, Artificial Sequence
  Synthetic
SVEEVVEEVRRVAEKVEEDVTRVIKEDEDIARELEKRIDDVIKESKTVADELLERLRRAG

SEQ ID NO: 21146 - protein, 59 aa, Artificial Sequence
  Synthetic
EEELERLLREVEELIERVKERHKRLVEDSKRLLDEVDKRLKDSNREVRERIEEIKRRVD

SEQ ID NO: 21147 - protein, 56 aa, Artificial Sequence
  Synthetic
DELEKIREEVREIVERSKREAKELLDRNKEIVKDLERKAREILRENRDRVRRLAEK

SEQ ID NO: 21148 - protein, 56 aa, Artificial Sequence
  Synthetic
SEVLDELRRIIETSEKLNRDVLRESKEVNRDLTRKLEEVLRRSKEDNKRLSEKIKE

SEQ ID NO: 21149 - protein, 56 aa, Artificial Sequence
  Synthetic
DELEAIKDEVRRIVRESEERAKKILRDVERMLDEIRKKLKEILDRNREVVDELKRQ

SEQ ID NO: 21150 - protein, 56 aa, Artificial Sequence
  Synthetic
SEVLKELRRIIEESKRRNKRVLDEIRKRAEDLRRVIKEVLDRSREINKRLSDEIRK

SEQ ID NO: 21151 - protein, 56 aa, Artificial Sequence
  Synthetic
DELEKIVREVREIVKESKEEARRILEENKKIVEELRRRLRKILEENEDMVRKLEKK

SEQ ID NO: 21152 - protein, 56 aa, Artificial Sequence
  Synthetic
SRVLEELERIIRESEEANKKVLEDSRRVNKKLSEELKRVLDESRRRNEELSKRIKD

SEQ ID NO: 21153 - protein, 60 aa, Artificial Sequence
  Synthetic
DELRDLEREIRRIVEESERHLKEVLERNHEASKRNRDDLKRMVDDIRRKVEEVRKLREEG

SEQ ID NO: 21154 - protein, 60 aa, Artificial Sequence
  Synthetic
AETVDRVLEKLKRIVEDSERRVKEVLKELEENSKRIKDETKDVLRKVEEIVERLRKEIER

SEQ ID NO: 21155 - protein, 60 aa, Artificial Sequence
  Synthetic
DELEELKEEVKRAVDENRETNKRALDRNHEISKDSEDHLRESSERIRRRIEELARLVEAG

SEQ ID NO: 21156 - protein, 60 aa, Artificial Sequence
  Synthetic
RETVKKVLKELREEIERVKRESEKVVKAVRDNSKRSEEKVEEVLERNKRIVDDVLRKIKK

SEQ ID NO: 21157 - protein, 60 aa, Artificial Sequence
  Synthetic
DELKEAEDRVREVVRENEERLRKALEENHKISRDSEKHLRDLERTIKEIVKRVRDLRRRG

SEQ ID NO: 21158 - protein, 60 aa, Artificial Sequence
  Synthetic
KDTVEKVLRDLRRIIKEVKERSREVLKRVRENSDRSLKKVEEVLKRLEDIIRTVKEEIKK

SEQ ID NO: 21159 - protein, 60 aa, Artificial Sequence
  Synthetic
EDAERALKKIEEIVRRLTEELKRVLDANRESVDRLRRELEEVLKRNRELVRKLEKILEER

SEQ ID NO: 21160 - protein, 56 aa, Artificial Sequence
  Synthetic
REVVERLKKIIADLDRVVEEVIRTSRKVIKELEDTVRRVIEELKRVSDELKKKVED

SEQ ID NO: 21161 - protein, 59 aa, Artificial Sequence
  Synthetic
DKLEELLKRVEELVERLKEESERVLRRNHELSEKLRRILEEILKRNHDLSRDLEDRLRK

SEQ ID NO: 21162 - protein, 56 aa, Artificial Sequence
  Synthetic
DEVVKRVEDIIEKVREDLERSDEKLNDNVRRLEREVREVLKAVEDNARRLAEKTKT

SEQ ID NO: 21163 - protein, 59 aa, Artificial Sequence
  Synthetic
SEAEKLLEEVKDLVRRLKKDLERVLRDNHRLSEELRRRLREILEENKKLIDTLREIREK

SEQ ID NO: 21164 - protein, 56 aa, Artificial Sequence
  Synthetic
KEVAEKMRKIVEELRKEVEEVLKALKENLDRLRREVEKVVERIEDTLRELKKRATD

SEQ ID NO: 21165 - protein, 60 aa, Artificial Sequence
  Synthetic
SEAEKVLEEVKRLVEDIERKLREMLRRDNEISRKVRDDLRKILEENNELSRRVEEEIRRI

SEQ ID NO: 21166 - protein, 56 aa, Artificial Sequence
  Synthetic
EEVVEALEKVVRDVARRLEDVIRRVAENAKRLEDDLRKVEEELKENADRLEERAKK

SEQ ID NO: 21167 - protein, 59 aa, Artificial Sequence
  Synthetic
SEVEKLLEKLRELVERVEREARRILEENKELIKESLKRIRDLLEDNKRLIREVKEILRR

SEQ ID NO: 21168 - protein, 56 aa, Artificial Sequence
  Synthetic
KDVVKRIRDIAEKVRRDLKRVIDAVRDTSRESDRRLRDVIREVDESSRELVREIER

SEQ ID NO: 21169 - protein, 59 aa, Artificial Sequence
  Synthetic
SDMERLLRELEELVKELRERLRRLLEENKDLIRRSLDRARKLVRRIEELVRKVKEDLDR

SEQ ID NO: 21170 - protein, 56 aa, Artificial Sequence
  Synthetic
EDVLRKIEETARRLVKEIEDVIREVERTSRESDKKLEDVIDKLRKIVRKVLEELRT

SEQ ID NO: 21171 - protein, 59 aa, Artificial Sequence
  Synthetic
SEVEDLVRELERLVREAKKALDDLRRKLEELVRDSLRKAEELLKENHDLSREVKKLLED

SEQ ID NO: 21172 - protein, 56 aa, Artificial Sequence
  Synthetic
KKVADELRRIAKRLVEELERVIRELEKIAKESDERLKEVIDRLRENVERLVRELRR

SEQ ID NO: 21173 - protein, 60 aa, Artificial Sequence
  Synthetic
KELEDLDRDVRRVVEELREELRRLEEEDKRSVEENEERLERLERRLRKKVKELEEKRKRI

SEQ ID NO: 21174 - protein, 60 aa, Artificial Sequence
  Synthetic
REEVRRVLEELREKIKRVLEEIEEVLRRSREINKRLRDRTRTVAKRLKEIVDDVLRKVET

SEQ ID NO: 21175 - protein, 60 aa, Artificial Sequence
  Synthetic
RELEELLKEVEKAVRENTKLLKDLLDKDKKSVKENEETLRDLERKLREVVERLKRELKDI

SEQ ID NO: 21176 - protein, 60 aa, Artificial Sequence
  Synthetic
EKRVRDVLKRLREIIDTVKKVTKEVMERSEEINRRLLKRTKDVLRELEKIVKTVLDEVRK

SEQ ID NO: 21177 - protein, 56 aa, Artificial Sequence
  Synthetic
SEVDKVREDVKRLIEDAERVSDDVDRRVKRLAEALKETSDKVKEDVERLVRDIKRE

SEQ ID NO: 21178 - protein, 59 aa, Artificial Sequence
  Synthetic
EETLRRVLRKVEDVIRRNKEDNEKVLKDAKRVVEEDKRENEKALERIERIVRKLKEDTR

SEQ ID NO: 21179 - protein, 56 aa, Artificial Sequence
  Synthetic
SEAEEVVRRVEKLAEDIKRVIDKSLEDVERLVRDAKRRSREVLREVEKLVEDITRR

SEQ ID NO: 21180 - protein, 59 aa, Artificial Sequence
  Synthetic
EEILRRALEKVERVITENKKENEDALRDAKRKIDKDKEDNKKVLDDVRRIIEELKEETR

SEQ ID NO: 21181 - protein, 61 aa, Artificial Sequence
  Synthetic
DEVDRVAEEVKKLIDDVKRVSDEMLKRSEDLIREVKKTSDDVLETVERLIRDVERKVEERV

SEQ ID NO: 21182 - protein, 59 aa, Artificial Sequence
  Synthetic
DEVLKRLLDKIREDAKRNKDDNKRNLDESKKEVDRNKDENRRVLEKVKETVKRLKDEVK

SEQ ID NO: 21183 - protein, 61 aa, Artificial Sequence
  Synthetic
KEVEEMLKEVKKLIEKVKRRSDDVLRRSEELARDLKKMSDDVLREVKKLIDDVKRTVDERV

SEQ ID NO: 21184 - protein, 59 aa, Artificial Sequence
  Synthetic
REFLKEVLDRVRERVEENERRNDENLKKSKKRIDENKEKNERVLRKIREIARRLKEELR

SEQ ID NO: 21185 - protein, 61 aa, Artificial Sequence
  Synthetic
SEVDRVLKTVEELIRRVKRISDRVLTEVKKLVDDVRRVVEKSRRDVEELVKEVKRSVDERV

SEQ ID NO: 21186 - protein, 59 aa, Artificial Sequence
  Synthetic
KEMLERALKEIKEEVKRNEDDNRRMLREIEELAKRNKEENKRVLDEVRDIVRRLAEEVK

SEQ ID NO: 21187 - protein, 61 aa, Artificial Sequence
  Synthetic
EEVERVREEVDKLLKTLKEVSDRVLKASKDLLDRVKEIVEKSLRDVKRLIDDVKRKVDERV

SEQ ID NO: 21188 - protein, 59 aa, Artificial Sequence
  Synthetic
KEVLERLLKKAEEIIRKNKKENDDNLEESRKEIEKNEEDNRELVKRIEDEVRRLKKEVE

SEQ ID NO: 21189 - protein, 61 aa, Artificial Sequence
  Synthetic
SEVEEVLRRVRELIERVKRIVDESEKEVRRLIEEVKKIVEESLKRVEELLRDVKRRVDERV

SEQ ID NO: 21190 - protein, 59 aa, Artificial Sequence
  Synthetic
RKMLREVLEKIKKIVKDNEDDNRRALTEVRERVRENVEENKKVVDRVRKIAEDLRKEVE

SEQ ID NO: 21191 - protein, 61 aa, Artificial Sequence
  Synthetic
SEVERVLEEVKKLIEDVKRVVKESEEEVEKLIRDVEREVERSKRTVDELVKDVKRAVDRDV

SEQ ID NO: 21192 - protein, 59 aa, Artificial Sequence
  Synthetic
REVLTKVLREVEEAVRRNKERNKRALEEVKKTVDRNREDNKRMVDKVRETAKRLKDEVR

SEQ ID NO: 21193 - protein, 56 aa, Artificial Sequence
  Synthetic
SSIEKVREDVKELIRDVERAVKRVKEESKKLVDDLRRAVKRVEEESRKLLKDLERN

SEQ ID NO: 21194 - protein, 59 aa, Artificial Sequence
  Synthetic
DDDVRRVLREIERIVKEVKDDLKRVLEESERSIRRVKEELRRVLEDNRRLLKEVKDRAR

SEQ ID NO: 21195 - protein, 60 aa, Artificial Sequence
  Synthetic
SEVEAVLREVEERVDRVRKESEKTLREVERLVREAKRRSKKSLDDVKKKVEEVKKKIRDI

SEQ ID NO: 21196 - protein, 55 aa, Artificial Sequence
  Synthetic
EEVKREIEKLVEDVRRVSDRVVEEIKELVKDVERMSRKVVEDIKRLAEDVRREAE

SEQ ID NO: 21197 - protein, 60 aa, Artificial Sequence
  Synthetic
DEVERVLEEVKERVDRVKRESEKSLKEVEKLVRTNERLSERTLKEVRDLVEDAKKKIDDI

SEQ ID NO: 21198 - protein, 55 aa, Artificial Sequence
  Synthetic
EEVRREIEKLVEDVKRVSDKVVEDIRRLAEKLRRDNKRAEDEIRKLVRDVERRAK

SEQ ID NO: 21199 - protein, 60 aa, Artificial Sequence
  Synthetic
DDLERVLEEVRKLVKELKERSRKSLEDVRRSNERNETESRRTLREVRELVKKVKEVIDRT

SEQ ID NO: 21200 - protein, 55 aa, Artificial Sequence
  Synthetic
EKVKEDIRRLVEEVERVSREVVERIKKLADESRKKNKKVIDEIKELVKRVRDRAK

SEQ ID NO: 21201 - protein, 60 aa, Artificial Sequence
  Synthetic
REMEEVLKEVEKRVRDIEDESRKTLERVDKLVKKNKRDSERTLKEVEDLVREVKKEIRRI

SEQ ID NO: 21202 - protein, 55 aa, Artificial Sequence
  Synthetic
EEVKREIKKLADRVREVSERVVREIEKLVRDIKRRNEEVIDEIRKLVEDVKREAK

SEQ ID NO: 21203 - protein, 60 aa, Artificial Sequence
  Synthetic
KEVEDVLEEVKELVKELKRVSEETLRRVEKSNRENEEKSKTTLKEVEDRVERVKEEIKKT

SEQ ID NO: 21204 - protein, 55 aa, Artificial Sequence
  Synthetic
EEVKREIKKLVEEVRRVSEEVVREIKKLVDKSRRVNEKVIEDIKELAKEVEEAAR

SEQ ID NO: 21205 - protein, 60 aa, Artificial Sequence
  Synthetic
SELEEILERVRKMAEDAERISEETLRRSEELIRRVKDLSRESLERVERLIRKVKKEIEEI

SEQ ID NO: 21206 - protein, 58 aa, Artificial Sequence
  Synthetic
EEVLRVIKAIEDLLRRVERVSREASKTSEELLKDITRVSEKSKEDIKRLLDDVRRKVK

SEQ ID NO: 21207 - protein, 60 aa, Artificial Sequence
  Synthetic
SELDEVLKTVEELVRRIKEKLKEILDRSRKLVEEARKLSEDSLREVKRVIDEIKREAERQ

SEQ ID NO: 21208 - protein, 58 aa, Artificial Sequence
  Synthetic
EEVLKLVEDVRRLVEDVDRTVERMSRESKKLAEDIKRVSEKSKRDIERLLADVERTVR

SEQ ID NO: 21209 - protein, 60 aa, Artificial Sequence
  Synthetic
DELDEVLKEVEELIKRVKRESERTLKENRDMVREIKRRSEESLREVRELIERVKDELRRT

SEQ ID NO: 21210 - protein, 58 aa, Artificial Sequence
  Synthetic
ERVARVVRRVEELLEDVERRSREVLKEMDKTAKEVKKASEKSEEDIKRLLEDVERTVR

SEQ ID NO: 21211 - protein, 60 aa, Artificial Sequence
  Synthetic
KEAEDILKEVEDIIREAKKLSERTLDENRKVIRKAKEDSRRSLEEVRKIIEDVKEELDRI

SEQ ID NO: 21212 - protein, 58 aa, Artificial Sequence
  Synthetic
ERVLRVIREIEKLLEDVKRVSERSVKEMKKTLDDVRRASKRSEEEIERLLRDVERRVT

SEQ ID NO: 21213 - protein, 60 aa, Artificial Sequence
  Synthetic
RSLEEVLKEVEELIRRAKEESKRTLDDVRKLIEEVKRESERSLRDVREMIERAKDRIRRI

SEQ ID NO: 21214 - protein, 58 aa, Artificial Sequence
  Synthetic
EEVRKVVEDVERLLRDVERMSKEVEKRIRELLDDIRRVSERSRREIERLLEDVERTAR

SEQ ID NO: 21215 - protein, 60 aa, Artificial Sequence
  Synthetic
DELEEILKRIEDRIREIKERSKKTLDDIRKVAERVEERSRESLKEVREVVEEIKDRIRRI

SEQ ID NO: 21216 - protein, 58 aa, Artificial Sequence
  Synthetic
REVLKVIRDIEELLREVAEVSERSRREIEKLLEDVERVSREAIKRIKDLLRDVERTVK

SEQ ID NO: 21217 - protein, 60 aa, Artificial Sequence
  Synthetic
KEIEELLDEIRRLMERSKENVRRSLKKSKDLIEEAKRRLEKSLEDSRELIRRIEDRIRRI

SEQ ID NO: 21218 - protein, 55 aa, Artificial Sequence
  Synthetic
KEVLEEIRRLLEDLRRMNEKSIEDSKRLLEDVARAVKRSIDESRKLLEKIERDVD

SEQ ID NO: 21219 - protein, 60 aa, Artificial Sequence
  Synthetic
KEMEDLLREAEELIRRSVENVKRSLEESEKLIRESKKNVERSLRRSEELAKEIKDEIRRI

SEQ ID NO: 21220 - protein, 55 aa, Artificial Sequence
  Synthetic
ERVLREIRRLLRELEEINEKSIRDSKRLLEEIERVNRDSIRRSKELLEDVERTVR

SEQ ID NO: 21221 - protein, 60 aa, Artificial Sequence
  Synthetic
SEVEDLLRRAEELIRRAKERLERSLRRVEKLIDDVRRKLERNNETVKRLVEEIKEKIKRI

SEQ ID NO: 21222 - protein, 55 aa, Artificial Sequence
  Synthetic
EEMLKEIERLLEDIERVVRETIDTTRRLLEKIEREVREVIKSNRELVADLERTVT

SEQ ID NO: 21223 - protein, 60 aa, Artificial Sequence
  Synthetic
DEVERLLEEVKRLIDRAREELKKSLDRVRRLVRENEEAVRKNNEDVADLIRKIKEKIEKI

SEQ ID NO: 21224 - protein, 55 aa, Artificial Sequence
  Synthetic
KKVLDDIRRLLKDIKDIVDKTIRDTKELLRDIEEKNRRATKSNKDLLEEIRETVR

SEQ ID NO: 21225 - protein, 59 aa, Artificial Sequence
  Synthetic
DEVEKLLRRVEKEVDRIKRELEDNLRRVEKLVKEIHEENEKLMRKARKLVEDIKRIIDR

SEQ ID NO: 21226 - protein, 59 aa, Artificial Sequence
  Synthetic
SEEVKKAEKEIRRLLDELRRVVEEVTKKTKELLRRLKKSSDELRKTIKELLRELEEKVR

SEQ ID NO: 21227 - protein, 59 aa, Artificial Sequence
  Synthetic
KEVDEILRELEELVKEIKKRLEELTREVKRLVDKIHKDNEDNLRDMARLVEEIKEIIRR

SEQ ID NO: 21228 - protein, 59 aa, Artificial Sequence
  Synthetic
SKEVERVERDVERLLDELRRVVKEVLDRIRRLLEELERSSKRVKEETERLVKEVREAAK

SEQ ID NO: 21229 - protein, 59 aa, Artificial Sequence
  Synthetic
SEVDKILEDLRELVERIHKKNKRIVEEDRELVKEIHRKNEENLKTMERLVEEIEKIIRR

SEQ ID NO: 21230 - protein, 59 aa, Artificial Sequence
  Synthetic
SEEVKRVRKDVDRLLKELEDSSREVKERSRRTLEELERSSREVKERTERLLRKLEKAVE

SEQ ID NO: 21231 - protein, 59 aa, Artificial Sequence
  Synthetic
DRLEEILKELRELVETIHRRNEEIVRKVAELVKRIHDHNEENTRRVEELVRRIKDIIRR

SEQ ID NO: 21232 - protein, 59 aa, Artificial Sequence
  Synthetic
SEDVERAKRDVDRLLKELEESSERVLRTIEKLLKELRESSKRVRDETKRLLDELREAVR

SEQ ID NO: 21233 - protein, 59 aa, Artificial Sequence
  Synthetic
SELDEILKRLEKLVEDIKRKLEKLVRDLERLVKRIHDHNEENLKTVKKLVDEIKDIIRR

SEQ ID NO: 21234 - protein, 59 aa, Artificial Sequence
  Synthetic
SREVDRVREDVRRLLEDLKRVAERVKRDIERLLKELKESSDEVKKRTEELLEELERAVR

SEQ ID NO: 21235 - protein, 59 aa, Artificial Sequence
  Synthetic
DEVDDILRRLRELVERIKKHLEDNLRELEELVKRIHDHNKRNVEEVKKLVEEIKKIIAD

SEQ ID NO: 21236 - protein, 59 aa, Artificial Sequence
  Synthetic
SEEVRRVKEEVERLLEEVRRVVRKVKEESKRLLEELRRSSDRVKKETERLLEELERAVK

SEQ ID NO: 21237 - protein, 59 aa, Artificial Sequence
  Synthetic
SEAEALVEEVKRIVEESKRRLEKVVEESRKLVEEVKKRLRDMLKTIEDLVKEVKELLDN

SEQ ID NO: 21238 - protein, 55 aa, Artificial Sequence
  Synthetic
EEVKRKVERLLEEDRRVLEEVKESAKRTSKEVRDELREVSKRVEKLLKDVRDAAR

SEQ ID NO: 21239 - protein, 59 aa, Artificial Sequence
  Synthetic
DEAEDLVRRVRDIVRKSREELKRVVEESDRLVEEVKRRLKKVVEDSKRLVDEVRKLREG

SEQ ID NO: 21240 - protein, 55 aa, Artificial Sequence
  Synthetic
EEVKREVERLLEDDERVLREVAKRSRETLETVRKVLEEVERRSRKTLEEVEKTAR

SEQ ID NO: 21241 - protein, 59 aa, Artificial Sequence
  Synthetic
SEMDELVDRARRIVEESRRLLEEVVKRSKDLVKDVKKKLEDALRRVEEIVRRLDEELKG

SEQ ID NO: 21242 - protein, 55 aa, Artificial Sequence
  Synthetic
EEVKDEVRKLIEEDKKVLDDVRRKSERTLREVEDVLRRVEEEVEKLLRKVEESAK

SEQ ID NO: 21243 - protein, 59 aa, Artificial Sequence
  Synthetic
DEAEKLVEDVRRIVEKIRKELEDVVEESRELVERIRRELERVVEESERLVEELRKELEK

SEQ ID NO: 21244 - protein, 55 aa, Artificial Sequence
  Synthetic
EEVKEEVKKLLEEVRDVLRKVKKASEETLRDVRRVLEEVKRRSEETLKRVREEAT

SEQ ID NO: 21245 - protein, 60 aa, Artificial Sequence
  Synthetic
SEVEDIVRDVKRLVEENHRRNEEIVRRDEDLVRRNNELNKRILEEVEELVRRLEDVARKI

SEQ ID NO: 21246 - protein, 55 aa, Artificial Sequence
  Synthetic
EEALRTAEELIKRLEDSLREVKDRSKRSLDEMKKSADDVRREIERLIKRVRDTTK

SEQ ID NO: 21247 - protein, 60 aa, Artificial Sequence
  Synthetic
SEVEKIVREVEEVVERIRKKSEDSLREVRRLVEEIKRRSEKTVEDDEKLVKDAKDELRRI

SEQ ID NO: 21248 - protein, 55 aa, Artificial Sequence
  Synthetic
EDAKRRIEELMKEVRDVSRRALKEIKDLLREVEEVSKKALKRSKDTVDEVREEVR

SEQ ID NO: 21249 - protein, 60 aa, Artificial Sequence
  Synthetic
DEVEEIVKEVARVVDEIRRLSKESLDRVRKLVEDIERELRKIVKTDRDLVEEAKRVLKDI

SEQ ID NO: 21250 - protein, 55 aa, Artificial Sequence
  Synthetic
REVEKEIRRLVEEVKEVSRKVRKEIEELMRRVEEVVKTVKEESKKTVREVEETAR

SEQ ID NO: 21251 - protein, 60 aa, Artificial Sequence
  Synthetic
DEADEIVKRVEEVVRRAKETLERILKRVEEMLDRIRKESEKTVREDEKLVEEVKDRLRKI

SEQ ID NO: 21252 - protein, 55 aa, Artificial Sequence
  Synthetic
ERLLREIKRLLKEVEDEVRRVEKAIKELVDRVKEVSDRALERSKRTVREVEERVR

SEQ ID NO: 21253 - protein, 56 aa, Artificial Sequence
  Synthetic
SEVEEVKEDSKRTLKELKDVAKKVDDDSKRLLEELERVARKSIEDSKRLLDELRER

SEQ ID NO: 21254 - protein, 59 aa, Artificial Sequence
  Synthetic
EKELRRLVEDDRRLVEEVKRDSERLLDEIRKLVEEIKERLRRSVEELRRRVEEIKKTTT

SEQ ID NO: 21255 - protein, 56 aa, Artificial Sequence
  Synthetic
SSVEKVKRDSERTLREVEKVIEKVDRDSERLLRDVERVITEADERSKDLLRRLEES

SEQ ID NO: 21256 - protein, 59 aa, Artificial Sequence
  Synthetic
DTDLRRLVEEDRKLVTRVKEESKRLLEELRRLVETVRKRSEDLLREIKKRVDEILRRTK

SEQ ID NO: 21257 - protein, 60 aa, Artificial Sequence
  Synthetic
DEIKEVIDRITKVLEDNERVVRKLSEENKKVLDDIRRRAEEIIRRNEEVLRRIKELAKRN

SEQ ID NO: 21258 - protein, 55 aa, Artificial Sequence
  Synthetic
EELKKALDDILRRLEESNRKNIEDSRRILEDVERIVRRVVEVSKDIVRKAEEDVR

SEQ ID NO: 21259 - protein, 59 aa, Artificial Sequence
  Synthetic
SEVEEVIDELRKVLEENKRRVEELSRENDDVLRRIEERLKKIEDELEKILKDVRDLKDN

SEQ ID NO: 21260 - protein, 55 aa, Artificial Sequence
  Synthetic
ERLKEEITRILEELTRINEENKRRSEEILDRVRKDVERVLKRVEDILKEIEDELR

SEQ ID NO: 21261 - protein, 60 aa, Artificial Sequence
  Synthetic
SSVEELEERLRRVLERSERHLRKLEKKVEEVLDESRKNLTRLLRDVERVLRDVEETVRRE

SEQ ID NO: 21262 - protein, 59 aa, Artificial Sequence
  Synthetic
ERKARELKRTVKRLAEESRKILREVEEKVRKVAEDSERILEEVERTVKRVVEEIDRTVR

SEQ ID NO: 21263 - protein, 60 aa, Artificial Sequence
  Synthetic
SKVEKLLRELEEVLKDSERHVREDSDRLRRVLEDSERHVRKVLRDVEKVLREVEDMVRKR

SEQ ID NO: 21264 - protein, 59 aa, Artificial Sequence
  Synthetic
EEKARRLEERVEEIVRESERTSRENNKKSRDIIKTSEDILREAADRVREVVERIRRTLT

SEQ ID NO: 21265 - protein, 60 aa, Artificial Sequence
  Synthetic
KEVEEVIERSKKSNEENERRLRKILEEARRINEENEKLLRKILEEAKRVVEEVRRILKDN

SEQ ID NO: 21266 - protein, 59 aa, Artificial Sequence
  Synthetic
KEELDKLREESKKILRHSERLLKEVEEEVKRILEHSEELLRRVEDKVRRLLKEIEDALR

SEQ ID NO: 21267 - protein, 60 aa, Artificial Sequence
  Synthetic
DEVEEVEKKVDKIDKENEDLLRKVIRDAERINEENTRLLEDILRKAKKMVDDVREILKDR

SEQ ID NO: 21268 - protein, 59 aa, Artificial Sequence
  Synthetic
EEEVRRVAERVKEVVKHSRELLKRVEDMVRRIVEHSKRLLDEVRERVKDLLRKIAEARK

SEQ ID NO: 21269 - protein, 59 aa, Artificial Sequence
  Synthetic
DEVREVVRRLEEIVRDVNKKNRESVREAERLVDRLREILEETSRRLKELVDRVKELIKG

SEQ ID NO: 21270 - protein, 59 aa, Artificial Sequence
  Synthetic
EKEARELEDAVRKLIERLKRSAEEVKKRVEELDEEIRRVVEEDRRTIKELKEEIDRADK

SEQ ID NO: 21271 - protein, 59 aa, Artificial Sequence
  Synthetic
DEVEEAVKRIEDLVERLRELLEKTSREIEKILKESEDKLRESSDRIRRLLDELKKLIEN

SEQ ID NO: 21272 - protein, 59 aa, Artificial Sequence
  Synthetic
EEKLRKAEDTVRRVIKDVRKMLEDDRRTVEEVIRRDREALEKDRKTVDDVIEDVKRVAK

SEQ ID NO: 21273 - protein, 59 aa, Artificial Sequence
  Synthetic
SEVDEAVEEIKRILEESKKRLDETSEEIKRILEDSERRLRESSKRIRELVKELKKRIDG

SEQ ID NO: 21274 - protein, 59 aa, Artificial Sequence
  Synthetic
KDKLTRIREVVDKVVKEDEDALREDERTVREVIKRDRDLLEEDRRTVEDVIRKVRETAR

SEQ ID NO: 21275 - protein, 59 aa, Artificial Sequence
  Synthetic
SDAEKVVKRIKEIVEDSTRKVRDTSRDIRRILDESRKMLEDVVREIKDLVRRLEELIRG

SEQ ID NO: 21276 - protein, 59 aa, Artificial Sequence
  Synthetic
KDTLDKVREDAERVLEEDKKVADDDRKTVEDVIREDKRLLKRVEEEVKRVIKEVDDAAK

SEQ ID NO: 21277 - protein, 59 aa, Artificial Sequence
  Synthetic
SEVDRAVETIRRILEESEKIIRKVVREIEEILDRSRRLLEKSSEEIEDLVRRLKELIEG

SEQ ID NO: 21278 - protein, 59 aa, Artificial Sequence
  Synthetic
ERLLREAEKDVRRVVEEDEKVLRDVARRVEEVIKADKKLLREDEKTVREVIERVKETAR

SEQ ID NO: 21279 - protein, 59 aa, Artificial Sequence
  Synthetic
DEFREAVRRIKEIIDDSRRKLEKNVKENEELLKRSDDELRKSSEDIKKLLEELRRLIEG

SEQ ID NO: 21280 - protein, 59 aa, Artificial Sequence
  Synthetic
EKSLREVEERVERLLEDDRRLLEENARRVEDLIRKDKEALDRDRKTVEDVKREVEKDAR

SEQ ID NO: 21281 - protein, 59 aa, Artificial Sequence
  Synthetic
SEVDEVVKRIAEIVKTSKDELREAVKRIEDIVRRSEKMVRDNLRENERLVRELDKLAKG

SEQ ID NO: 21282 - protein, 59 aa, Artificial Sequence
  Synthetic
KEKLDRVTETVRRLIEEDKRALEDVERKVEDVIRRDREVLERNRREVERLIKEIEDKRR

SEQ ID NO: 21283 - protein, 59 aa, Artificial Sequence
  Synthetic
KDAERAVEEIRKILEDSKEKMERNVRENEKLVRDSRRKLEENVERNEKLVRDLKRLKEG

SEQ ID NO: 21284 - protein, 59 aa, Artificial Sequence
  Synthetic
KDTLKRVTDEVRRVVEEDKRVLEENRRRVEKLIEEDKRALDENRERVRKLIEDIDKDAT

SEQ ID NO: 21285 - protein, 59 aa, Artificial Sequence
  Synthetic
DEVEDAVEKLKRLVDELERLLREAVRRIEKILEDSTRKVRKNLEENKELVKRLRELIKN

SEQ ID NO: 21286 - protein, 59 aa, Artificial Sequence
  Synthetic
KDLLRKVAEVVRRLEEEIRRLLEEAKRVVDEVIKKDRTVMERNREEVERLIREIEETAR

SEQ ID NO: 21287 - protein, 59 aa, Artificial Sequence
  Synthetic
SEVDEVVERIRRIIKKSKEELDKAVRDIEEILRRLEKELRDNVRENEKLVEDVRRAIEG

SEQ ID NO: 21288 - protein, 59 aa, Artificial Sequence
  Synthetic
KDKLERVSREAKRVLKEDEEALRDVEKKVTDVIEAVKKMLEDNRDRVRRLIEEIKRRAT

SEQ ID NO: 21289 - protein, 59 aa, Artificial Sequence
  Synthetic
DEIREAVKRIRRLLEESHRENKEIVDRLRKLVEESHRKNEKLKRELEELVKKLKEIIDK

SEQ ID NO: 21290 - protein, 59 aa, Artificial Sequence
  Synthetic
SEDLKRAEEEIRKVSEDNKRSVDRVREVVKRLSDENRRSLEEVREVVKRLIREVEEARR

SEQ ID NO: 21291 - protein, 59 aa, Artificial Sequence
  Synthetic
DEIRKVVKEITDLLKKSNDKNRKVVEEIRDLLRKSKKLADELVERLRKLVEDLRRRIDK

SEQ ID NO: 21292 - protein, 59 aa, Artificial Sequence
  Synthetic
SEDLKRVEERAREVSRRNEESMRRVKEDADRVSEKNKEVLDRVREEVKRLIEEVRETLR

SEQ ID NO: 21293 - protein, 59 aa, Artificial Sequence
  Synthetic
DRIRDVAREIRELLKRSNDENRKVVEEVRRLLKESNDTNKRVVDEVRELLERLKEIARR

SEQ ID NO: 21294 - protein, 59 aa, Artificial Sequence
  Synthetic
SEDLKRIRREVEKVSEDNKRSAKEVEDEARKVSEDNERSVRDVKEKADRVIKEVEDEDR

SEQ ID NO: 21295 - protein, 60 aa, Artificial Sequence
  Synthetic
DEERKIKRVLDEVDKHSKRVIAEAKRVVDEVLREVEKVVRRNKEVLDEILREVKRILDEG

SEQ ID NO: 21296 - protein, 55 aa, Artificial Sequence
  Synthetic
EELIKTIRKVNKEIEDRVRDLIKTVRDILRRIEEEVRKSIEDSKRLLRELEARAE

SEQ ID NO: 21297 - protein, 57 aa, Artificial Sequence
  Synthetic
SVVEDLKRTVEEVVKKSEEILKEDRKTVEKVVEEVKKSDKEDRDDVDRVVKEVRKRI

SEQ ID NO: 21298 - protein, 59 aa, Artificial Sequence
  Synthetic
KDLADKVKKDAEEVLKRSKEHVDRSIDRTREILKRLRETNEESIKRTRDILRKIAEEAR

SEQ ID NO: 21299 - protein, 57 aa, Artificial Sequence
  Synthetic
SVSEELKKKVEKVARDVERSLERDATEVTKVVEEVKKSDRKDEETVKRVVKRVDELI

SEQ ID NO: 21300 - protein, 59 aa, Artificial Sequence
  Synthetic
REVAEKVIRDAEKVLDDIRRMNEESIRDTRRVLEENKRKNEESIRKTEEILRRIEEESR

SEQ ID NO: 21301 - protein, 60 aa, Artificial Sequence
  Synthetic
SEVDEVLKELERINRENHREVEELLRRLERILRESKKHIKEVIEDLRRRLKELEDEVRRR

SEQ ID NO: 21302 - protein, 59 aa, Artificial Sequence
  Synthetic
EKKVRELEEEARRVKRSTEEVIKRLRDSVEKLVKDSERVLRELKKEVERVVEEIDKMIK

SEQ ID NO: 21303 - protein, 60 aa, Artificial Sequence
  Synthetic
DEVEKALEESKKSNEENHRKVKKVLESAKDINRRNHDLVRDVIRKLEEILRRIEKVVREG

SEQ ID NO: 21304 - protein, 59 aa, Artificial Sequence
  Synthetic
DKEVTELRESSRRSIESTREAVRTLEEAVREVIKSTDEAVKRLEATVKRIEEEIRKSMK

SEQ ID NO: 21305 - protein, 60 aa, Artificial Sequence
  Synthetic
DDVERVLKKSRDSNRENHEKVKRVIEKSDRSNEDNHRLVEDAIRKAEEILEEVERLVTAG

SEQ ID NO: 21306 - protein, 59 aa, Artificial Sequence
  Synthetic
KEEVDELRKSSEDSIRSTEDVVRKLEETSKRSIRSTEDVARKLEEAVRRIERRIRERTR

SEQ ID NO: 21307 - protein, 59 aa, Artificial Sequence
  Synthetic
SEVEEVLKRSKESVERVDRDVRRVLRELEDLNRKNHKRVEEVIRDAERILREVEDMVRR

SEQ ID NO: 21308 - protein, 59 aa, Artificial Sequence
  Synthetic
DKEVDELRKSSEKSVEDIKRVVDRLRDSARKIIKSTEDVVKELERRVREVIKRIKEEAT

SEQ ID NO: 21309 - protein, 58 aa, Artificial Sequence
  Synthetic
SEIEEIIKRIEKLLRDDEKKIRDSIKRSEDLLREANRENKESIDRVRELLEKVKRLRE

SEQ ID NO: 21310 - protein, 61 aa, Artificial Sequence
  Synthetic
KAEEEVRRLEKRVRDVLRELEKTLKRVTEVHKETTKENEKSARRVKREVEKVIEEVERTRT

SEQ ID NO: 21311 - protein, 58 aa, Artificial Sequence
  Synthetic
SEIEEIIRRIEELEERLKRELDRSIRTSEKLLEDAREINKESIRRVEKLLEEIRRVVD

SEQ ID NO: 21312 - protein, 61 aa, Artificial Sequence
  Synthetic
KAEERVRALEKAVKDVLESLKRLLDEVRKRHKESSEDNERSLKRSKEEAEKVIKAVEDERR

SEQ ID NO: 21313 - protein, 60 aa, Artificial Sequence
  Synthetic
SEIEDIIRRIRKLLEEDKEKIERSIRESRRLLEEAKRINEKSIEDVKRLLREIEDVVDKI

SEQ ID NO: 21314 - protein, 59 aa, Artificial Sequence
  Synthetic
REKVERLREDVDRVRKELEKTLETVTRSHKRSSEENKRSLEESERTARKVIEDIRRRDR

SEQ ID NO: 21315 - protein, 60 aa, Artificial Sequence
  Synthetic
KDIEEVLKRIKDLLEDIRRRLKESEERSRKLLEEAREINERSIERVRRLLEEIRRLKEEI

SEQ ID NO: 21316 - protein, 62 aa, Artificial Sequence
  Synthetic
EEMERKVRELERAVREVIKEVEKLLTDVARKHKKVSRDNKESLRRSEEEARRVIRAVEETDR

SEQ ID NO: 21317 - protein, 57 aa, Artificial Sequence
  Synthetic
STLETVEKKVEEVIRENEKSMRESEEKVDRSTKRIEDVLRRLEETIRKTSDDIAKDV

SEQ ID NO: 21318 - protein, 59 aa, Artificial Sequence
  Synthetic
REDATRVIEEAKRILDEARKLNEETIRRSEELVRRIERVIEEIIKRSEKLLEDVRRESK

SEQ ID NO: 21319 - protein, 57 aa, Artificial Sequence
  Synthetic
SVLDDVRKKVEEVLDRNRELADRSRRTVEEVLRENERVMEESKRTVDEVIKRVAEKL

SEQ ID NO: 21320 - protein, 59 aa, Artificial Sequence
  Synthetic
REDAERMIERLKRILDRVEEENRRAIEELREVLERVRDDNRRTIEELERILKRVEEESR

SEQ ID NO: 21321 - protein, 57 aa, Artificial Sequence
  Synthetic
STVETVREEVERVLKHSDDLIKEVEDVNRRVEEEIKRVIRELEEENERLVREVRKKV

SEQ ID NO: 21322 - protein, 59 aa, Artificial Sequence
  Synthetic
EEEAREIIKRLREVNKRTKEKLDELIKHSEEVLERVKRLIDELRKHSEEVLEDLRRRAK

SEQ ID NO: 21323 - protein, 57 aa, Artificial Sequence
  Synthetic
DEVERVAKEVEDVLREVEKLIRDVRRKVEEVLKHSEEVAKRVRDTNRELVKEVERDI

SEQ ID NO: 21324 - protein, 59 aa, Artificial Sequence
  Synthetic
EKELRDIIRRLKEVLDKLKKDLEDIIRRLEEVNRESERLAREAIRHSEEVLDKLRKDSK

SEQ ID NO: 21325 - protein, 60 aa, Artificial Sequence
  Synthetic
REVEEVKKRIREALEESERVIRENKKKNEELLDRVRKEIERNKKKNEEVLKRAKEVTKAG

SEQ ID NO: 21326 - protein, 55 aa, Artificial Sequence
  Synthetic
EDVKRKIDRMVEESRKLVEDLKRESDRVEEEVRKLVKTIKDEITRSLDEVRKDAE

SEQ ID NO: 21327 - protein, 60 aa, Artificial Sequence
  Synthetic
SEVDEVRKDIERILRKSERDIRRNKEENKRLLDEVRRRIEENRKENEDLLKRIEELRRAG

SEQ ID NO: 21328 - protein, 55 aa, Artificial Sequence
  Synthetic
EEVKKEIDKAVEDSKRLVEDAERVSDEVRERVRRLVERLKEESDRVEREVEKRTT

SEQ ID NO: 21329 - protein, 60 aa, Artificial Sequence
  Synthetic
SEVEEVLRRAEKLSEDNKRENDESLERLRRIVEKVREENEESVKTLEKILKEVEEVVRRN

SEQ ID NO: 21330 - protein, 59 aa, Artificial Sequence
  Synthetic
KEVIKRLEDEVRRLEEDNKRSIKKSEDEIRKLVERLKRSAERSDEVIRKLEKDAEDLIR

SEQ ID NO: 21331 - protein, 59 aa, Artificial Sequence
  Synthetic
DEVERILEDSKRLVDELRERVERVIEESKRLLDDLRRKVEEVVRRLEKIVEDLKRMIEG

SEQ ID NO: 21332 - protein, 59 aa, Artificial Sequence
  Synthetic
EDKVRELKETADRSNEEIKRVLEKIKRMIEDTNRKIKKLLEEIRDVARRVLEEVREVAR

SEQ ID NO: 21333 - protein, 59 aa, Artificial Sequence
  Synthetic
KEVEDVLRESKRLVEDLERRSERSIEESKRLLKELEDLVEEVIRRSEESIDRLRELIKG

SEQ ID NO: 21334 - protein, 59 aa, Artificial Sequence
  Synthetic
EKKVRDAEREARDSNDKIRRSLEKVERVVRETNRRIKELLEKIERVIRDTDRKIAEEAK

SEQ ID NO: 21335 - protein, 59 aa, Artificial Sequence
  Synthetic
SEVEKIVRDSEKLLEDLKRELEKVIKDSDDLVRELKKRVTEVLERLRRIVEELRKLIEG

SEQ ID NO: 21336 - protein, 59 aa, Artificial Sequence
  Synthetic
EEKVRRLEKEARRTNEEIRKLLEKVDEVARRSNERIKAVLEEIKREIEKLKREVEKDAK

SEQ ID NO: 21337 - protein, 59 aa, Artificial Sequence
  Synthetic
SEIEEVLKKSKKLVDDLRKEVEETIRESKKTVDDLDKEIKEVVRRSEESLDRLKKLIDG

SEQ ID NO: 21338 - protein, 59 aa, Artificial Sequence
  Synthetic
ERKVDEIRRAVEETNEEIKRVVDEDNKAVKRSLEEIERVAEEIKRVAEETLKAIEDARR

SEQ ID NO: 21339 - protein, 59 aa, Artificial Sequence
  Synthetic
DEVEELVRRLEELVKRSRDTNRKIIKEIRELSERLKRELEKIARELEKLVEDLKEEVKR

SEQ ID NO: 21340 - protein, 56 aa, Artificial Sequence
  Synthetic
VEKIEDVVRRLLEENERVLRRTEEEARRVLETNRDLLRKIREVVDRLEKEIREAEK

SEQ ID NO: 21341 - protein, 58 aa, Artificial Sequence
  Synthetic
SDADRVAEELKKLVEDSRRENERVIEESKRLVKENEDRNRELIERLKKLVDKLRDILE

SEQ ID NO: 21342 - protein, 56 aa, Artificial Sequence
  Synthetic
VDKVRETVKRLLEENKRVMEKTEEVAKKSSEDIKRVADETRRRAEELLKEVDELRK

SEQ ID NO: 21343 - protein, 59 aa, Artificial Sequence
  Synthetic
SEADEMLRRLKELVDRSRDTNRKILKRSEDLVRDSKKKNDDIIRELRRLLEELRELARR

SEQ ID NO: 21344 - protein, 56 aa, Artificial Sequence
  Synthetic
TDDVRREVERLLRDNKRVLDETRKAAEESTRRNKKVLEESREVVKDVLKKIEDTDR

SEQ ID NO: 21345 - protein, 59 aa, Artificial Sequence
  Synthetic
DEVREVAERLRRLVDESRKRNEEVIKESEALVDRVRKTNEEVMKRLRELIDKLEKDIRR

SEQ ID NO: 21346 - protein, 56 aa, Artificial Sequence
  Synthetic
VETIERVVRELLEENKEVLRKTEEMVKRSTETNKRLLERSKEVADRLRERIKEAAK

SEQ ID NO: 21347 - protein, 59 aa, Artificial Sequence
  Synthetic
DEVDELLKRLRKLVDEVRKENDKMVKESKRLVEDLKRKIDEIIERIERLLEELEKILKD

SEQ ID NO: 21348 - protein, 56 aa, Artificial Sequence
  Synthetic
VEDIEREAERLLRENEELLRRSEEVIRRSTEKIKKVLRDAEERAREILKRVEDAAK

SEQ ID NO: 21349 - protein, 60 aa, Artificial Sequence
  Synthetic
DEVEEVKKKLREIVKRDRDLIERVREELKEILDRNREINRRAIEDLKRILEEVDELVKRG

SEQ ID NO: 21350 - protein, 59 aa, Artificial Sequence
  Synthetic
EELIRDVERVVREVLRRIEKSIRDLDRVIRDVLDKSRELIKRSEDVAKRVVDTLREKAR

SEQ ID NO: 21351 - protein, 61 aa, Artificial Sequence
  Synthetic
DEVETVKKELKELADEVKERNERSIRDSERLLEEVKRRNEKSIRDLERLVEELEDVLRKRG

SEQ ID NO: 21352 - protein, 59 aa, Artificial Sequence
  Synthetic
EKKVKEVTDEVKKVLDEIRELDKRSRDAVRRTNEEIKRLDKESKDVVDRVKKKVEDAVR

SEQ ID NO: 21353 - protein, 61 aa, Artificial Sequence
  Synthetic
REVEEIIERLKKLLKEIAERNTESIKELEELVRRIAEDNKRIIEELRRLLEELADVVRKKG

SEQ ID NO: 21354 - protein, 59 aa, Artificial Sequence
  Synthetic
EKKVREVRKVAEEVLRAIEELDKRSRDAVRRVTKRVKDLDEETKRVVEDVLRRIEELMK

SEQ ID NO: 21355 - protein, 61 aa, Artificial Sequence
  Synthetic
SRVEEIIEDLRRLLEEIRKENEDSIRRSKELLDRVKEINDTIIKELERLLKDIEKEVREKG

SEQ ID NO: 21356 - protein, 59 aa, Artificial Sequence
  Synthetic
EDKVRKVREVAEKVLRDIDKLDRESKEAFRRTNEEIRKLDEDTRRVAERVKKAIEDLAK

SEQ ID NO: 21357 - protein, 61 aa, Artificial Sequence
  Synthetic
SEVEEIIRRLEELVREVAKRNEDIIKRSRDLIRKVKEDNRRSEEELRDLSRRIADIVRKKG

SEQ ID NO: 21358 - protein, 59 aa, Artificial Sequence
  Synthetic
ERKVREVRRVAKKVLEDVKTLDDKTREVARRTNEDIKRLDEKSRKVIEEVRREIEELKR

SEQ ID NO: 21359 - protein, 61 aa, Artificial Sequence
  Synthetic
SEVDEIIKELERLLREIARENERIIRESRKLADEVRKRNEDAIRKLEELVRRLADMVRRKG

SEQ ID NO: 21360 - protein, 59 aa, Artificial Sequence
  Synthetic
KDKVTKVKKVADDVLREIKKLDDETRRVIEDTNKKIKDLDKKTRDVVRKVLEEVKKLEK

SEQ ID NO: 21361 - protein, 61 aa, Artificial Sequence
  Synthetic
SDVEDVIRKLETLVDDLRRKVERIKERSRELIKRIAEENRKVIEELERLLEELADVVRRKG

SEQ ID NO: 21362 - protein, 59 aa, Artificial Sequence
  Synthetic
EKKVRDVRRVAEKVLREVRRLMEEVERVARKTNRDIERLDEETRRVVEKVRKEIEDLRR

SEQ ID NO: 21363 - protein, 57 aa, Artificial Sequence
  Synthetic
SAKDKIAEVAKRVLTENKKLLEESEEVARRTSEESKRLLKESEDVVRRVLDEIRREI

SEQ ID NO: 21364 - protein, 59 aa, Artificial Sequence
  Synthetic
ERLIEEVIRRLEELLKEVKKKNEEVIRRSKELIDRDRDLNRRSIEELERLIREVRKESK

SEQ ID NO: 21365 - protein, 57 aa, Artificial Sequence
  Synthetic
SAKEKIKEVAERVEKRNKELLEESERVIKEVSERSERLLDESRKVVKRSTEEIRDKI

SEQ ID NO: 21366 - protein, 59 aa, Artificial Sequence
  Synthetic
EELIREVIERLKELVDRVEKENRKAIETSRRLLKEDEDLNRESIKRSEELVKDVRRRST

SEQ ID NO: 21367 - protein, 57 aa, Artificial Sequence
  Synthetic
DARKELEEVVRRVEEEIRRLLKDIEDVAREVNRRSEKLLRETEEVIRRSTEEIKRDV

SEQ ID NO: 21368 - protein, 59 aa, Artificial Sequence
  Synthetic
RERVKEIIERLRRLVEELKKLVDEVRKRLEDVVRELKERNKKVIDDSKDLVRRAREESR

SEQ ID NO: 21369 - protein, 59 aa, Artificial Sequence
  Synthetic
DFSERLDEVLRKVRTDIKKLVEKVRRVVEDSRRRVEKLVEDVRRSSEEVLKTVKELLDR

SEQ ID NO: 21370 - protein, 59 aa, Artificial Sequence
  Synthetic
DEVVRRLEKRLRDALKEAEDKVRRDEERNREVLERLEKIVRDLHRENEKAVEDVADRAR

SEQ ID NO: 21371 - protein, 59 aa, Artificial Sequence
  Synthetic
DLSEEVKRVIEEVRKRIEELVDEVRKSTEEVIKRVRRLVEEVERVVEDSRRKVDKLLKE

SEQ ID NO: 21372 - protein, 59 aa, Artificial Sequence
  Synthetic
EEVVRRLKEELEKALRDAERIVKELHEENRKVLEDVKRMVDEDKKKNERVVDEVRRDAK

SEQ ID NO: 21373 - protein, 60 aa, Artificial Sequence
  Synthetic
SLSEEVKKVIREVEEDVKRLVRELRESSERVLKEIKKLVDEVRRVLEESKERVKKLEREG

SEQ ID NO: 21374 - protein, 59 aa, Artificial Sequence
  Synthetic
DEVVRRLKKRLKEALDRLRDIARKLDKENKEALDEARRIVEENKRRNEKVVEDVERRAE

SEQ ID NO: 21375 - protein, 60 aa, Artificial Sequence
  Synthetic
DEVEELKKDLKRVLEEVRKIVEDIHRTNEEVLREVEKIVEDIHRENKEVLEKVEKIMREL

SEQ ID NO: 21376 - protein, 59 aa, Artificial Sequence
  Synthetic
EELVREVKRVVDELEKEVRDLLRRLKESTDKLREDVRRLAERLRDSLREMERDVREKTR

SEQ ID NO: 21377 - protein, 60 aa, Artificial Sequence
  Synthetic
DEVERLKRELETVLRDVERIVEEIHRENKKNLDKVKKIVEEIHKENREVLEKVRKIMEEL

SEQ ID NO: 21378 - protein, 59 aa, Artificial Sequence
  Synthetic
KKLVEEVEEVVKRVEEAVEELARRLEKSTRDVVEESKKLARELEKSLEEVKEEVRKLIT

SEQ ID NO: 21379 - protein, 60 aa, Artificial Sequence
  Synthetic
KELEELIKRLKRVLEENRDIVRKIHEDNERNLDELRKIVERIHKENKRVLEEVKKIFEEL

SEQ ID NO: 21380 - protein, 59 aa, Artificial Sequence
  Synthetic
ERVVREVERVIKKLEDDSRKTVRDLEESTKEVEKRSKELADELEKSIEDLERRVDEDTK

SEQ ID NO: 21381 - protein, 60 aa, Artificial Sequence
  Synthetic
REVEELKKELERVLKKVADLVEENERRNRKNLEDLRRIAEEIHRRNEEVVKRVRDTLERL

SEQ ID NO: 21382 - protein, 59 aa, Artificial Sequence
  Synthetic
EKLVRDVERVVEKVERDVKRLADRVREVLKESSDRSRELVERLRESLRKAREEVRKAIE

SEQ ID NO: 21383 - protein, 59 aa, Artificial Sequence
  Synthetic
KDVDEVLKRLRELIDELRKTNERVKRELKKLVEDLERKNKDVERRLRELIRTLEEIARK

SEQ ID NO: 21384 - protein, 59 aa, Artificial Sequence
  Synthetic
KDMVKKVRDVIEDLKREVERLDRETKEVVERVKRKIEKTNRDSKKVIDDLRREVERLRK

SEQ ID NO: 21385 - protein, 59 aa, Artificial Sequence
  Synthetic
SEAERIVEELRKLIEDLRRKNEEVKERLKRLVREDEKRNEEVLKELEDRADELRKLVEK

SEQ ID NO: 21386 - protein, 59 aa, Artificial Sequence
  Synthetic
KDVVDRLRRVIEDLKRTVEKSNEDSDRVIKEVKKRIDDSLKRVEDVIRRVKETIDRLEK

SEQ ID NO: 21387 - protein, 59 aa, Artificial Sequence
  Synthetic
SDVDRVAKDLEKLIRDLEKINRDVSRENKELIEKDKKINEDVLRELDRLVEELERLVRE

SEQ ID NO: 21388 - protein, 59 aa, Artificial Sequence
  Synthetic
KEMLEKIRKVAERLRREVERSNEESKKSADEAEKTIRKSLKEVEERIREVEKKIRDLKR

SEQ ID NO: 21389 - protein, 59 aa, Artificial Sequence
  Synthetic
SEVDRVLKELDELIRTLEELNKKVSRENRELIKEDKKRNDEVVKRLEDLIRELKERVDK

SEQ ID NO: 21390 - protein, 59 aa, Artificial Sequence
  Synthetic
KDALKKVREVIERLKEEVERLDRETKKSADEAKEAIKRSLEEVEDVVRKIREKIKKAEE

SEQ ID NO: 21391 - protein, 59 aa, Artificial Sequence
  Synthetic
DEVERAKEELEKLVRKDEEDNDRVRKRLEELIRRLKEENDRVLEELRRLSEELDRLAKE

SEQ ID NO: 21392 - protein, 59 aa, Artificial Sequence
  Synthetic
KEALDEVRRVIEEVKREIERSLRESREVIKELKERVKELDERTREVVRKVKEEIDELER

SEQ ID NO: 21393 - protein, 59 aa, Artificial Sequence
  Synthetic
SEVDDVLRRLDKLVKDDKRTNDRIVTRDRETVKRVKEVNREIVERLERLVDRVREIVER

SEQ ID NO: 21394 - protein, 59 aa, Artificial Sequence
  Synthetic
EDALRKVREVIRRVEEDIKRSLRDSERVIEEVVTRNEKVDRETKKVVDEAKREIDERAK

SEQ ID NO: 21395 - protein, 60 aa, Artificial Sequence
  Synthetic
SELEKLIEELERVLKRIEEVSRELDKELETVLDEIRRASKRLNDELRRALEEIARAATEN

SEQ ID NO: 21396 - protein, 58 aa, Artificial Sequence
  Synthetic
KLLERAEDVIRRVREALEELVRTNRESLERVERAARELNRRNEESLERARREVEKLRR

SEQ ID NO: 21397 - protein, 60 aa, Artificial Sequence
  Synthetic
DEVRELIDRLRKALEEITRESRRLDEELRKVLEEVERRVEELSRRNKEMLDRVREKVTRR

SEQ ID NO: 21398 - protein, 59 aa, Artificial Sequence
  Synthetic
SRLLEELKRVIDEVRREVERLNKKNKESLDRARRRVEDLLRRLEESVRRVEEELKKLST

SEQ ID NO: 21399 - protein, 59 aa, Artificial Sequence
  Synthetic
SELERVIRESERTVEESHKHVREVIRKLRDIVRRSHEHVREVIERSKESVERVRDLVRR

SEQ ID NO: 21400 - protein, 59 aa, Artificial Sequence
  Synthetic
EELVRRLKKVLDESEKAVTRNIEEIKKVLEDVVRKAEKNIREIAEVLERSTRAAKKDTD

SEQ ID NO: 21401 - protein, 60 aa, Artificial Sequence
  Synthetic
ELEKRIDEVLKRVEDEIRKSIRENEEVLKDVERAVKELIKENERVLEEVREEVRKIIERV

SEQ ID NO: 21402 - protein, 59 aa, Artificial Sequence
  Synthetic
EDIVREVEKELEDILRDNRRLVRESIESLKDVVRRVAELVERSIRELKKMVDEIRKEAE

SEQ ID NO: 21403 - protein, 60 aa, Artificial Sequence
  Synthetic
KLEERIEKVLEDAERDVRRSEEEIRRVLKEVEDRVRRLLRENEDALRRVEEEVKKIIDRV

SEQ ID NO: 21404 - protein, 59 aa, Artificial Sequence
  Synthetic
EKIVKRVIETLRELLKENRKLVKDVIEDLKRIVKEVEELVRESIERLKDMVRRISEKAK

SEQ ID NO: 21405 - protein, 59 aa, Artificial Sequence
  Synthetic
KEVEEIIETLKRLSEDLERKVREIIERLKRLSERLERENKEVIKELERLIDELRKLVED

SEQ ID NO: 21406 - protein, 59 aa, Artificial Sequence
  Synthetic
SEDLRKLDRVVKESERTIRDLLRKLDEVAKRSDDTIERVNDETAKVIERVKRKIEELEK

SEQ ID NO: 21407 - protein, 59 aa, Artificial Sequence
  Synthetic
REVEEMIKELEELLKDLKEKNERASKRNRELVRRLEEENKRVIEELKKLVKELEDLVRS

SEQ ID NO: 21408 - protein, 59 aa, Artificial Sequence
  Synthetic
SEKLKELRDVIKEVKKRIDELDEYTRESIRRAKKEIERLNRETKKVIEEVVKRIEEERK

SEQ ID NO: 21409 - protein, 56 aa, Artificial Sequence
  Synthetic
SEKEEVRRVIEELRRILKRVLEDLRRVVKENEDRLRELKKENEKSLRELEERARRI

SEQ ID NO: 21410 - protein, 56 aa, Artificial Sequence
  Synthetic
VEDLKREIDRVAKEVEEVLEENRRRNEKSVEELRRDSKRNHERNEEVVKEAEDAAR

SEQ ID NO: 21411 - protein, 56 aa, Artificial Sequence
  Synthetic
SEEERVRKALEELKRELDKVHENNKRSLRENEETLKKLLEDNERSLRELEEEMRRV

SEQ ID NO: 21412 - protein, 56 aa, Artificial Sequence
  Synthetic
VEELIKTLRRVAKEVRERSEENDRRNKKSVDELREDSKRNHDENDKVLKKLEKAAE

SEQ ID NO: 21413 - protein, 56 aa, Artificial Sequence
  Synthetic
DEVEKLEEDSERSLEELRKTVEEVKKRSEDSLRDLERKSRENEKESRRTLRELREK

SEQ ID NO: 21414 - protein, 59 aa, Artificial Sequence
  Synthetic
ERVRKRVKDAAEKSRRVIEDLLREIKRVADDSRREAKRLLDRNKEVLERSKETADREKK

SEQ ID NO: 21415 - protein, 56 aa, Artificial Sequence
  Synthetic
DEVEKLAEDSKRSLEKLRREVEKVKRESRESLKRLKEESEKNVRDLRRLLEELRRR

SEQ ID NO: 21416 - protein, 59 aa, Artificial Sequence
  Synthetic
ERLLKRVKDVMDESRKVIRELLELIKEVIRESKETVKRLLDENKRVADEVRKVVDELRK

SEQ ID NO: 21417 - protein, 60 aa, Artificial Sequence
  Synthetic
SEVEEVEREVKEVIEELDEIVKRVKEENDDSVRKSKRSLDEIEAEVRRVLKELTDRVTKR

SEQ ID NO: 21418 - protein, 59 aa, Artificial Sequence
  Synthetic
EEVLERLTRLIEKLKDVIRRLRERLKKSADDSRDVIRRTLEAIKEIIERLKEVIDRLDK

SEQ ID NO: 21419 - protein, 60 aa, Artificial Sequence
  Synthetic
DEIEKLREDVKKTLEESRKSVEDLERRSEDSIRRSRESVERLKREVKEVIDRLRDARRRG

SEQ ID NO: 21420 - protein, 59 aa, Artificial Sequence
  Synthetic
KRVLDEIKKLADEDNKTVTDSLKRIRDSAKKVDEVVRESLERIRKVAEEITKVVEDVKR

SEQ ID NO: 21421 - protein, 59 aa, Artificial Sequence
  Synthetic
SELETLEKSLRDVLKESRDSVEKLRKEVEDTIKESEDSVTKLLKEIEDVIRRLEDLRRR

SEQ ID NO: 21422 - protein, 59 aa, Artificial Sequence
  Synthetic
EDVLRRIRRAAEEVRKVAKESVDRIRDLAARDNEVVERSLKKIEEVLRRIKKVADDVAR

SEQ ID NO: 21423 - protein, 60 aa, Artificial Sequence
  Synthetic
SEIERLEREVREVIKESEESVRRLKKRVDDTVRENEELVKRLEDRVRRMKERLEDARRRG

SEQ ID NO: 21424 - protein, 59 aa, Artificial Sequence
  Synthetic
DDVKRKIRKVMEEIKKRADDSRRKIEDVARKDNKAVERSLRRIERLLEEITRVVEEIKK

SEQ ID NO: 21425 - protein, 60 aa, Artificial Sequence
  Synthetic
SELEKLDKESRDSIRKSEDSVRRLEEESEESIERSKRLVEELKRLADEVIRRLEDMARRG

SEQ ID NO: 21426 - protein, 59 aa, Artificial Sequence
  Synthetic
EDVLRAIEESMKRARKAVEDSLRRIRESLEKVKEEVRRSNEKIKKIVKEVREVVERIAD

SEQ ID NO: 21427 - protein, 60 aa, Artificial Sequence
  Synthetic
DELEDLEREVREVIEESKRLLEELEKRVKEVIKTSRDSVRRLKERVDRVIKELRDAKRRG

SEQ ID NO: 21428 - protein, 59 aa, Artificial Sequence
  Synthetic
EDVLRKIRELLEEIRRVIEETNRRIKKLLEEIKRVADDSRRRIRKVAREVEEEAKEIEK

SEQ ID NO: 21429 - protein, 60 aa, Artificial Sequence
  Synthetic
SVRERIDELEKKIKRVVEKVLKENKDSLKRVEERVRRLLEENKRSLDEVREAVERVLSEV

SEQ ID NO: 21430 - protein, 56 aa, Artificial Sequence
  Synthetic
VEKLERDVEKVIEDARRTSEEVKRENDKALKDLDRLSEEVEKENRKALEDLKRTSD

SEQ ID NO: 21431 - protein, 60 aa, Artificial Sequence
  Synthetic
SVRETIDKALKKIRDVAEDLKRRNDELLKEIEEVARDSSEKIRRALEEVERRVREVLKRV

SEQ ID NO: 21432 - protein, 56 aa, Artificial Sequence
  Synthetic
VEKLKKDIERIIRELEELSDRLKKIIEEVIKKSEDLVRRLRESLERVLREIDKTTK

SEQ ID NO: 21433 - protein, 60 aa, Artificial Sequence
  Synthetic
SVREEIDRILREIEEVVKTSSERIKRLLEKIEEVVKRLIEENRRVLKRTDEEADRLLKEV

SEQ ID NO: 21434 - protein, 56 aa, Artificial Sequence
  Synthetic
VDTLRKEVKEVIDTSEDLVRRLEEEVRKAAKRLKDLVDDSRRLNTEILRTLRERRR

SEQ ID NO: 21435 - protein, 60 aa, Artificial Sequence
  Synthetic
DDLKRLEEDVRRIIEENDRIVKDIAEKSKKSIEDNRRLLKRLRDESERTIDDIRRLKEEG

SEQ ID NO: 21436 - protein, 55 aa, Artificial Sequence
  Synthetic
EEIRRLLKEITDVVRESNRRIKRINETAHEVVRRSNTETTKVNKKAHDVVEEVKR

SEQ ID NO: 21437 - protein, 60 aa, Artificial Sequence
  Synthetic
SLIEKIREIVKEIIKRSDDSVEEVKRRNEESIRRSEESVKDNRRRIEDIIRKLKRLKEEG

SEQ ID NO: 21438 - protein, 59 aa, Artificial Sequence
  Synthetic
DDMLRKIEALAREVTEVSKRALEEIRKLMEESTEVSKRALERIEASVEEVRRVAEEVKR

SEQ ID NO: 21439 - protein, 59 aa, Artificial Sequence
  Synthetic
SLLEEIEKEVREIIKRSRKSLEEVKRRNDDSIRKSEKLVEDNKREIEEVKERARKLKED

SEQ ID NO: 21440 - protein, 59 aa, Artificial Sequence
  Synthetic
KRVLEEIDRLAKDVKRVSDEVLEEIKRLAKESKEMADRSNEEIKKSVEEVRRVVEEVEK

SEQ ID NO: 21441 - protein, 59 aa, Artificial Sequence
  Synthetic
DEIEELEKLIRKAIKDSRDLVRKLEEENKRSIDTSRELLKELERMLDEVRRRLEDLKRK

SEQ ID NO: 21442 - protein, 59 aa, Artificial Sequence
  Synthetic
EELLREIKKLLDTIRRVIEESSERIKKLAEDSREVVKESSTEIKRLLETITEVVDRVTK

SEQ ID NO: 21443 - protein, 59 aa, Artificial Sequence
  Synthetic
DEVEEAEKLIRKVIKDSEKLLRDLADLNRKSIRRSEKLVEDDRRANEDVIRKLEELRRN

SEQ ID NO: 21444 - protein, 59 aa, Artificial Sequence
  Synthetic
EELLRRIKKLLDEIKKAIEDSSREIKRLLEESERVAKRSSEDIKRTLDDTRRVVEEVRR

SEQ ID NO: 21445 - protein, 60 aa, Artificial Sequence
  Synthetic
DVEETVRKLIEDVKRVMERVRKSNTDLIRRSKEVLKDARRLHEELTKEVKDVLRRLEEEV

SEQ ID NO: 21446 - protein, 59 aa, Artificial Sequence
  Synthetic
REVVKRVEEDVRKKLEESTKDSKRVERESEENLRRAKEKSKRVLKKLKDDLRRLEEESR

SEQ ID NO: 21447 - protein, 60 aa, Artificial Sequence
  Synthetic
SVKETVKDLEREVREVLKKLRDDVRKLIEESDKALKRLKKIHDDLSRDVRRVLEDLRRRV

SEQ ID NO: 21448 - protein, 59 aa, Artificial Sequence
  Synthetic
KKMIDDVVRRVRKKLKEIDEKVKDVERKSRENLKRLKEKSDRVAEDLKKILDELREEVR

SEQ ID NO: 21449 - protein, 60 aa, Artificial Sequence
  Synthetic
SVEETITELIKEVRKVAEEVKKSNKEVIEESEEALKELERTHTELSEEVRKVLRELEEEV

SEQ ID NO: 21450 - protein, 59 aa, Artificial Sequence
  Synthetic
KEVVTEVVKEVKKRLEESKDDSRRVMEESRRNLKKLREESKRVVEELRRELRRLKEEVR

SEQ ID NO: 21451 - protein, 60 aa, Artificial Sequence
  Synthetic
DVEETVRKLIEKVKRVLERLEEEHKRLSDDSRRVVKKLKDDVEDLIRRVEEVLKELERRV

SEQ ID NO: 21452 - protein, 59 aa, Artificial Sequence
  Synthetic
RKAVDEVRKEVDRRLEELKRDSERVVKKSEENLRRLEEEVRKVEEKVRRTLKRLKEEAK

SEQ ID NO: 21453 - protein, 60 aa, Artificial Sequence
  Synthetic
DKLEKVLEEIKRRLEENERLLRKVERDLKRLSKENEDRLRKMLEDLRKLSEDLLRSVEKD

SEQ ID NO: 21454 - protein, 55 aa, Artificial Sequence
  Synthetic
EKVDELLKEVEEIIDRSRKEIDRTRKDNERSVKRSEDAIRKTLDENEKSLREATR

SEQ ID NO: 21455 - protein, 60 aa, Artificial Sequence
  Synthetic
SDVEEMEKRIRDRLRENRRIVEDVAKKLRDLSRRLEEEVKKVAEELRRLSDELRKRVTRR

SEQ ID NO: 21456 - protein, 55 aa, Artificial Sequence
  Synthetic
ERVKDLLREVKRVIDESKKTIRDTLEENEDSIRRLRERIDETLKENEKSIKELKD

SEQ ID NO: 21457 - protein, 60 aa, Artificial Sequence
  Synthetic
SSVEEVKKELDKILEELKEKSERSKEEVERVLKKLREKSDRVEREVRKAEERLRRKVKDI

SEQ ID NO: 21458 - protein, 56 aa, Artificial Sequence
  Synthetic
DETVERLLKKLKDVLEELRRRHEEVSKRLEKVLKELVDRHKKVTEDLKRVLDELRK

SEQ ID NO: 21459 - protein, 60 aa, Artificial Sequence
  Synthetic
SLEETLKKLIEEVEEVLRRSEEIAREAIRRSERVLEELERRHKKVTDEIKEMLRELRERI

SEQ ID NO: 21460 - protein, 59 aa, Artificial Sequence
  Synthetic
EELVERVLDKVRRDLEDSRRHLEEVKRKSEESLKKLKKETKDALDTIREKLKRIADELR

SEQ ID NO: 21461 - protein, 60 aa, Artificial Sequence
  Synthetic
SMEEKVKRIIKKVDDVLKDSERRITELIKKSRDVLRELEKRHEELTKRVKDVLDDLRRKI

SEQ ID NO: 21462 - protein, 59 aa, Artificial Sequence
  Synthetic
DRAVDTVRKEVEKALEENRKTVRDVEEESDRSLRRLREKTDEVRRRVEEILKRLKERVD

SEQ ID NO: 21463 - protein, 60 aa, Artificial Sequence
  Synthetic
ELEERIKELIKKVRDVLRKSKEEVDKVIRKSEEVVRETEKLVEDIIRRVEKVLDEVRKRI

SEQ ID NO: 21464 - protein, 59 aa, Artificial Sequence
  Synthetic
KELVRTLERRVEEVLRRNEELVKRVREESDRSIDRSRRSLERAEEDVDRVLKEVKDRTT

SEQ ID NO: 21465 - protein, 60 aa, Artificial Sequence
  Synthetic
DLEKKVEDVIREVEKVLRELRRRHEELTKRSEDAVKETKDRVKEIEDEVRRVVDKVRKDI

SEQ ID NO: 21466 - protein, 59 aa, Artificial Sequence
  Synthetic
DELVKELKRDVERVLKRLKERSDEVRKESEKSIKKSKDSLEKAEREVREMLRDLDRETK

SEQ ID NO: 21467 - protein, 60 aa, Artificial Sequence
  Synthetic
SMEERVKELIRRVRKVLEDTERRAKEIIEDVERVLEELKKRHEDLTRKVDKVLKELKKEI

SEQ ID NO: 21468 - protein, 59 aa, Artificial Sequence
  Synthetic
EKLVTKVEEDAERALRESEESLRKVEREVKRVLEELKRKTEKVARELDKILKELKDRTR

SEQ ID NO: 21469 - protein, 60 aa, Artificial Sequence
  Synthetic
SLEDELRKLIEDVKRVAKETEDRVREILKRSKDVLDELKKEHDKLTREVERVLDELAKEI

SEQ ID NO: 21470 - protein, 59 aa, Artificial Sequence
  Synthetic
EELVKKVKKEVEDVLRRSKESLKKAEEDSRKSLEELKKKTEDLKREVKEILDRLKERVR

SEQ ID NO: 21471 - protein, 60 aa, Artificial Sequence
  Synthetic
SELEKLKREVDEVLKRNKELVDELRKRVRKALEESRRSVEEVERRVEEVLKRLEDDLRRE

SEQ ID NO: 21472 - protein, 59 aa, Artificial Sequence
  Synthetic
EELKEKVRRILKEVRRVLDESRRDVERVLREVEKVMRESIKKARDAIRKVEEVLRELER

SEQ ID NO: 21473 - protein, 60 aa, Artificial Sequence
  Synthetic
RELDDARRKVEEVLKTNKDLVDKIRKEVEETLERLDRSSRKVREIVRRVLEELTRRATER

SEQ ID NO: 21474 - protein, 59 aa, Artificial Sequence
  Synthetic
EELKRLVEKLIKEVEDVLEESRKAVEDVIREDKRRMEESKREADELIREVKKVLDDLRK

SEQ ID NO: 21475 - protein, 60 aa, Artificial Sequence
  Synthetic
KELEDLEREVREVLKRSDESLKRLEEEVRRVLDENDKEVKRVKEKVKKVLDELREIVTRR

SEQ ID NO: 21476 - protein, 59 aa, Artificial Sequence
  Synthetic
EELKREVERLIREVEEVLKKSEEAVRRLIEEVDRALKRSREEFTKAREEVKKVLEDART

SEQ ID NO: 21477 - protein, 60 aa, Artificial Sequence
  Synthetic
DEIDKARKDIEDMLRRLRDLVRKLEDLNRKVVEELKDLVRKDRKLNEDIVRRLERLVRER

SEQ ID NO: 21478 - protein, 59 aa, Artificial Sequence
  Synthetic
EEVKRRIEELLRRVDKVADEVRREVERTNRESEEVVREVEEDVRRSLEEIDKVIKDVRT

SEQ ID NO: 21479 - protein, 60 aa, Artificial Sequence
  Synthetic
SEIDELRKRVEEVLRRLDELVKRLKEENDRVVKKAEDLIRRLEETNREILKKLRKLVKDD

SEQ ID NO: 21480 - protein, 59 aa, Artificial Sequence
  Synthetic
RDVLEKIKDLLRRVKEVADEVEKKIRELNKKTEDVVRELEERVRKLDEDVKRVIEEVKR

SEQ ID NO: 21481 - protein, 60 aa, Artificial Sequence
  Synthetic
SELDEIRERIERIEKDLERLVEEVKRVNDTIVERIKKLIDEVRKENEKVIKTLRDLVREV

SEQ ID NO: 21482 - protein, 59 aa, Artificial Sequence
  Synthetic
EKVEREIRRLLERVKEVIERVKDRVRRVDKKSRDVVREARRAIEEVDRRVRKVVREAEK

SEQ ID NO: 21483 - protein, 60 aa, Artificial Sequence
  Synthetic
DEIKKLEDEVKKILDDLRELIRKLEETNRDVERRLRELIAELRKRNDEVVKRLRDLVRRS

SEQ ID NO: 21484 - protein, 59 aa, Artificial Sequence
  Synthetic
EDVKRKIEEILRRVEEEIRRLKKEVERLDRESKRVIRELREDVKRTNTDVKRVVDEVRK

SEQ ID NO: 21485 - protein, 60 aa, Artificial Sequence
  Synthetic
SLVERLEERVKRIIDELRRILEENRRRVKKVSDENRDLLRRLEEENKKIIEDLRDLKRKG

SEQ ID NO: 21486 - protein, 59 aa, Artificial Sequence
  Synthetic
EKAKDKLRRLEEEIRKVAKEVEDELRRSTEYVKKSLEDAKRKLEELTKRTEDVAEEVER

SEQ ID NO: 21487 - protein, 60 aa, Artificial Sequence
  Synthetic
DLVERVEEKVEDIKRKLRRILEEVDRRNKEVSKENKELLDRLEEENERIIRELEKAKRDG

SEQ ID NO: 21488 - protein, 59 aa, Artificial Sequence
  Synthetic
DRAREKLKRLVEDIDRVAEEVKRTLEELSRYTDKSLEDAERSLERLTKETDEVLKRVTT

SEQ ID NO: 21489 - protein, 56 aa, Artificial Sequence
  Synthetic
SIVERLKKLAEDVIRRLERLSKELAKRNKEVIERLKELSKRLEDKNRRVIEELRRT

SEQ ID NO: 21490 - protein, 59 aa, Artificial Sequence
  Synthetic
EEVKRAIEELRDRIRKVIEDSERTIRKLNDDTRKVVEDSRRTIEELNRTTDKVIEEVRR

SEQ ID NO: 21491 - protein, 56 aa, Artificial Sequence
  Synthetic
RKVDELRKEVKRVIDELRELSERLRKENERVIKTLEDLVRRLEKLLERVERELERT

SEQ ID NO: 21492 - protein, 59 aa, Artificial Sequence
  Synthetic
EEVKKEIDRLRRELDRVIKESEDTIRRLNDETRKVIEKVRRAIEELLRRIEEVIKKVEK

SEQ ID NO: 21493 - protein, 56 aa, Artificial Sequence
  Synthetic
SIVEELRELVKEAIKRLKKLSDDLRRKNEEVIRTLKELLDRLKRKNEEVIKRLEDT

SEQ ID NO: 21494 - protein, 59 aa, Artificial Sequence
  Synthetic
EEVKREIEKLKRDVERVIEDSRRTIEELNRKTEEVIERVRRTIERLNEETKKVIDRVRT

SEQ ID NO: 21495 - protein, 56 aa, Artificial Sequence
  Synthetic
REVDELRKRVEEVIRELEKLSEDLAERNRRVSERNKELVETLARLNKRVIDELRRT

SEQ ID NO: 21496 - protein, 59 aa, Artificial Sequence
  Synthetic
EEVKKAIDDLRRELEEVIKRSKKTIDDLNRYTKKSIEDVREAIKKLNKETDDVAREVKK

SEQ ID NO: 21497 - protein, 56 aa, Artificial Sequence
  Synthetic
SIVEELKKLVEEAIRKLEKLLEELEEKNRDAIRRLKELSDELRKKNEEVIERLKRT

SEQ ID NO: 21498 - protein, 59 aa, Artificial Sequence
  Synthetic
EEVKRMIEKLRRDVEKVIREVRDEIRRLNDTTRRVIDKSRKTIEELNRTTEEVIERVKR

SEQ ID NO: 21499 - protein, 60 aa, Artificial Sequence
  Synthetic
DEEEVMRELKKEIDEALERSKEINDRLRKEIRDVLEKLERIVREVKERSERVLEDVRRKV

SEQ ID NO: 21500 - protein, 55 aa, Artificial Sequence
  Synthetic
KEAVDEIRRILREALEEDKKSVEDIRRDLDKIEKDVKKVLEDNERLLKRLREEVK

SEQ ID NO: 21501 - protein, 58 aa, Artificial Sequence
  Synthetic
DEEEVMKELEDRIREVDKKIEDRLRELKERSDRVLDRSRRINKKLKDEIEDALRRVRR

SEQ ID NO: 21502 - protein, 55 aa, Artificial Sequence
  Synthetic
KEAVDTIERKLRKLEEDLKKVERDNKKLLDDMERDDRRSLEEIKRILDELLEKVR

SEQ ID NO: 21503 - protein, 58 aa, Artificial Sequence
  Synthetic
REEEVMKELDREIEEVLERSREIVERLRREIEEVLKENKKIVETLKREIKKVLREVRE

SEQ ID NO: 21504 - protein, 55 aa, Artificial Sequence
  Synthetic
EEAVKRIRDILEKDERDVREVVRRIREILKASLEDSERSVEEIRRILDELRKEVE

SEQ ID NO: 21505 - protein, 58 aa, Artificial Sequence
  Synthetic
REEEVMERLRREIEKALRESHEIDDRLRKRIEDVLRDSERKLEELRRRIKKVMDDVRR

SEQ ID NO: 21506 - protein, 55 aa, Artificial Sequence
  Synthetic
EEAVRKIREELERMKEENDRVLKEIDKDLKDDDRKIEEVVERIERILRELRERVR

SEQ ID NO: 21507 - protein, 60 aa, Artificial Sequence
  Synthetic
DEKEVADELERKIDEALKESHEIDKRSDDHDKEVLKKSEKRLRELDEEIKDVLRKLEKKV

SEQ ID NO: 21508 - protein, 55 aa, Artificial Sequence
  Synthetic
REAVETIERILKRMIERNRAVVETNKKLNKEDEDKIREVVKRIREKLRKADEEVR

SEQ ID NO: 21509 - protein, 60 aa, Artificial Sequence
  Synthetic
ETEDKVRELLKRIRDVAEKAREKVEELVRRNEEVLKRARETVERLVRKNEEVLREVAERA

SEQ ID NO: 21510 - protein, 56 aa, Artificial Sequence
  Synthetic
KKELEDTVRKVLEDLERKLERLEEESREVERRVKKVLDELKRKSEESEKRLEEAAR

SEQ ID NO: 21511 - protein, 60 aa, Artificial Sequence
  Synthetic
DAEEVVRKLEEELKRLIDKLRKVMEESLKRVKESMDRSRKRIEELVRRLEKILRDLKRDR

SEQ ID NO: 21512 - protein, 59 aa, Artificial Sequence
  Synthetic
EDVLRKLKETVERVRRKVEEVIKKSRESVKRVEETNTRSLRELEETVREVEKRVREESR

SEQ ID NO: 21513 - protein, 59 aa, Artificial Sequence
  Synthetic
SEVEKLLKDLKELLEEVKRRAEESHRDLRRLLEEVRKRVEDSNRELERELRRAEDLVRR

SEQ ID NO: 21514 - protein, 59 aa, Artificial Sequence
  Synthetic
RKMERVVEEIRREVKKVLEDLRRILKESEDAARKVLRDLERLVKHSKDTAREVLKRLKK

SEQ ID NO: 21515 - protein, 59 aa, Artificial Sequence
  Synthetic
SEIEKLLRDLERLLEEVKRKAEKTNRDLEKLLEEVKRKVEDSHRKLKKVLDEVKDLVRR

SEQ ID NO: 21516 - protein, 59 aa, Artificial Sequence
  Synthetic
ERVKRLVEDVRRRVKEVLDDLRRIIEHSRRRAEKVLRELEKLVRESETKAREVLKDLKK

SEQ ID NO: 21517 - protein, 56 aa, Artificial Sequence
  Synthetic
SEAERLLEDSKRVLDEIREDLKRLLKESEDVMREIEKTLEKLVRDVERVLDEVRKS

SEQ ID NO: 21518 - protein, 56 aa, Artificial Sequence
  Synthetic
ERVLRTIKDLHRRLSEEVKRVLDEAEELHRRLSERVREVLEDIRRLVEELIEEVRK

SEQ ID NO: 21519 - protein, 56 aa, Artificial Sequence
  Synthetic
SEAEDLLRRSKERLDEVRKRLDELRRRSERVVEEIRRLLKELLDDVERVRKEVKEA

SEQ ID NO: 21520 - protein, 56 aa, Artificial Sequence
  Synthetic
DRVLRTIEDTHRRLSEDVKRVLKEAEELHRRVTEEVKDVLRKIRETAERLEEEVKK

SEQ ID NO: 21521 - protein, 56 aa, Artificial Sequence
  Synthetic
KEAEELLDTSRRVSEEVEKRLEKLLRESERVAEEIRKRLEELLRRVEKVLDELRKA

SEQ ID NO: 21522 - protein, 56 aa, Artificial Sequence
  Synthetic
EKVLKTIEDEHRRLSESVERVLRTAKRLHDEVSKEVRDVLEEIRRTVEKIIREVRT

SEQ ID NO: 21523 - protein, 60 aa, Artificial Sequence
  Synthetic
SVEEVLKTLEDLARESSEEVRRVAEEIERSNRRVVKEVEKVLREIEELNRKILEEVERDL

SEQ ID NO: 21524 - protein, 59 aa, Artificial Sequence
  Synthetic
EEVLRELLKEVAKVVEDTRRKLEELLKENEEMDRDLKRKLDELLERNREVLERLKRKVD

SEQ ID NO: 21525 - protein, 60 aa, Artificial Sequence
  Synthetic
SVEEVLKELEKLVRDSSREIKKVLEEIDKSNTDLLREVEDALRRIEERVKEALESVDRTV

SEQ ID NO: 21526 - protein, 59 aa, Artificial Sequence
  Synthetic
REMLERLLDTLRRRLEETRKELERLLTENKKKDDEVKEKLKRAEEELEDVRRRLEEKLR

SEQ ID NO: 21527 - protein, 60 aa, Artificial Sequence
  Synthetic
SAEEVLRRLKEAIKRLIRDSERVLEEIRRTNEELIKRTEEVLRRVREKAERLIDDVRRRL

SEQ ID NO: 21528 - protein, 59 aa, Artificial Sequence
  Synthetic
DEALRRIEKEVRDVEKRSKETLEDSKRDSERVRKKSEDTLREIETRVEDVRRKAEEEVR

SEQ ID NO: 21529 - protein, 59 aa, Artificial Sequence
  Synthetic
SESDRIRAIVKKVVDESKESLKRLKEETERVKRELDRVLKENKDKVRRLKEKAEEMKKL

SEQ ID NO: 21530 - protein, 56 aa, Artificial Sequence
  Synthetic
SDVLREVAERVTRLIRDSERVLEELAREHEKASRKVKKVLDESKKIVDDVIRRVDR

SEQ ID NO: 21531 - protein, 59 aa, Artificial Sequence
  Synthetic
SESEEIERTVEDVKRKSDKSLEESRRNVERLKEESEESLERNKDLVRRVAEKVEEVKRD

SEQ ID NO: 21532 - protein, 56 aa, Artificial Sequence
  Synthetic
SEAADRVREEVTKVIKKSEDVLRDSERLHREVIKTSRDVLDKSRRLVEEIIRRVRR

SEQ ID NO: 21533 - protein, 59 aa, Artificial Sequence
  Synthetic
SDVERVLREVEEIIRKARDRSREWLERVKKIIEKVKEDSKRWLDEVRKLIRDVEDIRRR

SEQ ID NO: 21534 - protein, 58 aa, Artificial Sequence
  Synthetic
ERVREVIDRIRKLLKDIIDEARDVNKKVRDLLKRIVEEVTEVNKRVKELVEEIVRRIK

SEQ ID NO: 21535 - protein, 59 aa, Artificial Sequence
  Synthetic
DELREALKRVADIVRTIEEAVRKSLEDSKRIVDDIRRASKEALEEVEKIVRTLVEIVRN

SEQ ID NO: 21536 - protein, 58 aa, Artificial Sequence
  Synthetic
KEVRDVIREVEKLLREVEKIVRDVNRESERLAKEVRDDATEVNERVKELLKRAEAAVR

SEQ ID NO: 21537 - protein, 59 aa, Artificial Sequence
  Synthetic
SVVEELRRTVKELLDEIKRRDDRLLKEVEEVAREVERKDDELRKKVEEILRRIKELRDR

SEQ ID NO: 21538 - protein, 55 aa, Artificial Sequence
  Synthetic
DRVLKELKELMDEAKKNSERVNKKVEDLLRRLDESSRRVNEEIEKRLTELLKAVE

SEQ ID NO: 21539 - protein, 59 aa, Artificial Sequence
  Synthetic
SVVEELLKRVRERLEDVDRVLRTWLEEVERLAEEVKRLDRELEKDVKRILDTIEELKRQ

SEQ ID NO: 21540 - protein, 55 aa, Artificial Sequence
  Synthetic
DKALEDIKRLLEELRKRVEDVSRRVNKLLRDLEENSKRVNDELRKRVETLVERVR

SEQ ID NO: 21541 - protein, 61 aa, Artificial Sequence
  Synthetic
REIEKVLKELRDIVRELEKLLEDVVRKIRKIVEETRKLLEDVVRESDKIHRDAKELMERAG

SEQ ID NO: 21542 - protein, 56 aa, Artificial Sequence
  Synthetic
EDELRKRIAELAERVKRMVKKLDEHAKRDFRRVEEEVRRLRENVKRVKDEVDEAVR

SEQ ID NO: 21543 - protein, 61 aa, Artificial Sequence
  Synthetic
SEIEKVLEELRRRVEELEERLKTVVDELKKIARRTEEKLDKVREEIERIYREAKDLLRRAG

SEQ ID NO: 21544 - protein, 56 aa, Artificial Sequence
  Synthetic
SDELRKAIAELERRVDKMLKELRDHITRDEDRVRRILEELRRHVERSLKRVREEVN

SEQ ID NO: 21545 - protein, 62 aa, Artificial Sequence
  Synthetic
SELEKVLEDVERRLRELKERNDRVLEEITKIHEDAKRENDEVLKEISRAHKEATEELERKIG

SEQ ID NO: 21546 - protein, 56 aa, Artificial Sequence
  Synthetic
LEELRRKLKELEERSERHLEELRRSAETVLRESREHLRRLEDSLRRVRKKVKEETD

SEQ ID NO: 21547 - protein, 62 aa, Artificial Sequence
  Synthetic
SEIETVLRDVKDKLEKLKRDNDKVLDEITKIHEEAMRRNDKVLEDIRRALEELKKRLEEKIG

SEQ ID NO: 21548 - protein, 56 aa, Artificial Sequence
  Synthetic
LEELKKELKKLEDESRKHLEELRRSLEEVTRRSDKHLKELKDRLEELRRKVEAATD

SEQ ID NO: 21549 - protein, 62 aa, Artificial Sequence
  Synthetic
SELEKVLEEIRRELEKLERANKKVLDDAKRIHDKAKEDLRRVLEEIKRRLEELEKRLEEAIG

SEQ ID NO: 21550 - protein, 56 aa, Artificial Sequence
  Synthetic
VEELRKELEDLRRESEEHLERLRDSARRVLEKVRRILKELRDRLRELAEEVKRATD

SEQ ID NO: 21551 - protein, 62 aa, Artificial Sequence
  Synthetic
DELETVLKRVEDLLRRLAEELRRVLEEARETLERLKAANEKVLEEITRTHEEAKRRLDRDIG

SEQ ID NO: 21552 - protein, 56 aa, Artificial Sequence
  Synthetic
VEELDKEAKDLVKEVDEILKRIREELKKLKEDNDKHLEELKESLKRVKDEVDEARR

SEQ ID NO: 21553 - protein, 62 aa, Artificial Sequence
  Synthetic
SELEDVLRDAERIIREAKEDNERVLRRLKETVEKLIKDNDEVLKKLTESHKKLTKELKDAIG

SEQ ID NO: 21554 - protein, 56 aa, Artificial Sequence
  Synthetic
VEELKEEIKDILRRNREHLEELKRRIDELRKENEKHLRDLEESIKEVEKEVRESRR

SEQ ID NO: 21555 - protein, 61 aa, Artificial Sequence
  Synthetic
SEIETVLEDAERKIRELKKRLEDVLRRLAEIYTRAKELLKRVLDELRKIYEDLKKKLEEKV

SEQ ID NO: 21556 - protein, 56 aa, Artificial Sequence
  Synthetic
VEELKKRLDEVARRVEKVLRENEEEIKESLKEVEKMLRRNRKEIKDSEKEVDDEVK

SEQ ID NO: 21557 - protein, 61 aa, Artificial Sequence
  Synthetic
DELERVLEDAETKIRDLKRKLKEVLDKLRRIYEELEERLKRVLEEIEEIYRRAAEALRRKV

SEQ ID NO: 21558 - protein, 56 aa, Artificial Sequence
  Synthetic
VEELKRELEEVAKRVEEILRRNEEEIKKSEEKIRKVLRDNREKAKRSLDRVREALK

SEQ ID NO: 21559 - protein, 61 aa, Artificial Sequence
  Synthetic
DELKKVLDDARETSDRLKKENETVFRELEEIYRRLEKELRRVLRELEEIYRRAEDKLTKSV

SEQ ID NO: 21560 - protein, 56 aa, Artificial Sequence
  Synthetic
VSELDKRIRELERRNRESVKENRDRLKESADDVKRALDRNREELEESERRVKKAVD

SEQ ID NO: 21561 - protein, 61 aa, Artificial Sequence
  Synthetic
SELEKALRDAEEIIKKAKKLLKEALDEAEKIYREAAKLLDDALREAEKIYREAADALDKKV

SEQ ID NO: 21562 - protein, 56 aa, Artificial Sequence
  Synthetic
AKELRDRAKEAADRAKRAAEENRKKARESLERAKRAAEDNRKKAEESLKRAEETAR

SEQ ID NO: 21563 - protein, 61 aa, Artificial Sequence
  Synthetic
SEIEDVLRRAKEISDRLKRENDRVLDELRRSYEDLERELEEVLRKLEETYRRAKEELRKKV

SEQ ID NO: 21564 - protein, 56 aa, Artificial Sequence
  Synthetic
VSELRERIERLKERNRKSLEKNKRDIARSEEEVRKALERNEDEIRRSEEEVKKALK

SEQ ID NO: 21565 - protein, 61 aa, Artificial Sequence
  Synthetic
RELEKVLEDIREISERLEKRNRDVLKELEDIYREAKKRLDDVLRKLKETYDRAEEELRRKV

SEQ ID NO: 21566 - protein, 56 aa, Artificial Sequence
  Synthetic
VSELRKDLRKLAEDNRRSLEENKKEITESLKEVEKVLERNKDEIRKSKERVDKALE

SEQ ID NO: 21567 - protein, 61 aa, Artificial Sequence
  Synthetic
SELERVLDEMRKIIERLEEELRKVLEDLRRIYEELKRKLDDSLRESERRVRELKEELDRKV

SEQ ID NO: 21568 - protein, 56 aa, Artificial Sequence
  Synthetic
VEELKDTIDKVKKRVEDALEKNRRDIDESRKEVDDELRKDEEKAERLAREVEKAKE

SEQ ID NO: 21569 - protein, 59 aa, Artificial Sequence
  Synthetic
SSDETVKEKVKKVARDVDRHVEKLRKALEEMEREVREHVKRLEDELRRMDEEVKRVREE

SEQ ID NO: 21570 - protein, 55 aa, Artificial Sequence
  Synthetic
EKVLRDAERIVRELERKLDKVDTEIAETVKRLEDTIRDVNRKIKDRVDKLRKELE

SEQ ID NO: 21571 - protein, 59 aa, Artificial Sequence
  Synthetic
DSDEKVKRVLEELRKEVKEHVERLRARAEDMSREVKDHVRKLKEDLERMERDVERVKRK

SEQ ID NO: 21572 - protein, 55 aa, Artificial Sequence
  Synthetic
EEVLERVRTEVERLKRELDKVNEDIRKRVEELKKELDEVDDEIRKEVDRLEEALK

SEQ ID NO: 21573 - protein, 59 aa, Artificial Sequence
  Synthetic
SSDEEVKKKLEEVKEEVKRHVERLKRALEKADRDVKDHVRRLKEVLKRMADEVEKVRRE

SEQ ID NO: 21574 - protein, 55 aa, Artificial Sequence
  Synthetic
EKVLKDVEEKIRRLEKELDEVNEDIERKVRELEKELRAVDEEIKRIVDRLRKELE

SEQ ID NO: 21575 - protein, 59 aa, Artificial Sequence
  Synthetic
SSSERVKTELDRMRKEVKRHVEELEKELKRLTEKVKRHVEESKKNAEEITRKVEDVRRK

SEQ ID NO: 21576 - protein, 55 aa, Artificial Sequence
  Synthetic
EEVLREVTREVTRLREELDEVNKRVEKRLEELERELDRSDEEVTRIVEELVDELR

SEQ ID NO: 21577 - protein, 59 aa, Artificial Sequence
  Synthetic
SSEEDVRRKLEKMRKEVDEHVRKLEEDLKRLAEEVKRHVEDLERVAKEVADRVEEVRRQ

SEQ ID NO: 21578 - protein, 55 aa, Artificial Sequence
  Synthetic
KKVLDTARDILRKLEKKLDDVDEKIERIVEKLKRELDEVNKRATETVERLIRELK

SEQ ID NO: 21579 - protein, 59 aa, Artificial Sequence
  Synthetic
RSDEELEKKLKELKEEVDEHVKRLEETARRLDKEVRRHVEESKRNLEEMDREVKEVRRR

SEQ ID NO: 21580 - protein, 55 aa, Artificial Sequence
  Synthetic
DKLLERAERTVRELERRLDEVNDRIRRIVEELKRKLDRSNEEVTRKVRELSKELE

SEQ ID NO: 21581 - protein, 61 aa, Artificial Sequence
  Synthetic
DELERVVEEVRKRIERLKEELRRVHERSREIVDRLRKELEKSLEEVRRIVEDLKRKLRERG

SEQ ID NO: 21582 - protein, 56 aa, Artificial Sequence
  Synthetic
EEDLERMADKLRKDVERAVRKNETDADKLRREVEEVVRRNKKTAKELEDEVRKELT

SEQ ID NO: 21583 - protein, 61 aa, Artificial Sequence
  Synthetic
SEREKVAKEATDIVEELKKTLKDVHRRSKEIVERLVKKLADVNKDSRDKAEELKKRLDDRG

SEQ ID NO: 21584 - protein, 56 aa, Artificial Sequence
  Synthetic
EEDVKRIAKKLEEDVRRVVRKNEEEIKKLAEEVDRVVEDNKRLVEELKRRVDEALK

SEQ ID NO: 21585 - protein, 59 aa, Artificial Sequence
  Synthetic
DADDELRKIVEEADRRSKESVREIEELLRKLEREVEDIVRRIKKLSDDTRKRIDDLRKE

SEQ ID NO: 21586 - protein, 55 aa, Artificial Sequence
  Synthetic
EEVLKRVEEIIKRLEEENRKVLEELERSVRKLEEDIRKVLEDNDRVVKELARRID

SEQ ID NO: 21587 - protein, 59 aa, Artificial Sequence
  Synthetic
SAVEKLEELVERVARRIDELVKKIKELLDDVERKSEKTVRDLERLSEETKRSIDDLRRE

SEQ ID NO: 21588 - protein, 55 aa, Artificial Sequence
  Synthetic
EEVLKRVRETLERLERKIKKVLDELKKRVEELRKKNEDVVRRNEEVVKKLVEDIR

SEQ ID NO: 21589 - protein, 59 aa, Artificial Sequence
  Synthetic
SVEDVIRDLRRVITESRELSERVLERIEETTRRSKEESKRVADKVKKSSDDLREAVERI

SEQ ID NO: 21590 - protein, 59 aa, Artificial Sequence
  Synthetic
DEKAKELLRRVKEVVDRNKEKLDRDLERNKRRIDENRRKLEEDLRRNRKVVEELRKRLE

SEQ ID NO: 21591 - protein, 59 aa, Artificial Sequence
  Synthetic
SVEDVAREIREVLRRLEESVRKVAEDNRRNNEELRRLVEEVLKRIRDSSDRLRKVVEDI

SEQ ID NO: 21592 - protein, 59 aa, Artificial Sequence
  Synthetic
DEVLERLLRRVREAVKELEDELERSSREDNRRSRELEEELKKDLKRNEDEIRDVERALK

SEQ ID NO: 21593 - protein, 59 aa, Artificial Sequence
  Synthetic
SVEEVLRRAEEILTRSKEESRRVFEEIRETTERSKEVSKDVARRNKEILDDLKRKIEEV

SEQ ID NO: 21594 - protein, 59 aa, Artificial Sequence
  Synthetic
DDVLRRLLEKIEEVVRDNERELKEDLDRNRKVIEENRKKLEDHLRRTEEEVDDIRRKLK

SEQ ID NO: 21595 - protein, 59 aa, Artificial Sequence
  Synthetic
KVEEVSKKLKDVLRELEELVERVLERNRENNERLRDKVRKVLEENKEVLDRLKKEVDDI

SEQ ID NO: 21596 - protein, 59 aa, Artificial Sequence
  Synthetic
EEDLRRLLEKIKREIDRLAKELEDSSRDDNRISRELDEELKRHLEETRRAVREISEKLR

SEQ ID NO: 21597 - protein, 57 aa, Artificial Sequence
  Synthetic
SRAEEVLKKVEEEVKKLEDELRRSSERNNRESRRLEDELKKVLDKNRKLVEDLRRAR

SEQ ID NO: 21598 - protein, 56 aa, Artificial Sequence
  Synthetic
KEVVDELRRVLERLRRVIEDVIRRNKEDTDRLEREIERVRKELKDINKKLEEDVRR

SEQ ID NO: 21599 - protein, 60 aa, Artificial Sequence
  Synthetic
DEAETLLRDVERKVEELKRRSEKLLRDVEELVRRLLRSNEESLKKVKEDLKRLKDLVRRG

SEQ ID NO: 21600 - protein, 56 aa, Artificial Sequence
  Synthetic
DEVLREVDRVIDDVRRALKKVNEEIEEVIRRLKRESERVNKEAEEIIRTLEDALRK

SEQ ID NO: 21601 - protein, 57 aa, Artificial Sequence
  Synthetic
DDLERVLEEIRREIERIRRELEESNEENKDIVRRIEEELKELLKDNKRIVETVTKAN

SEQ ID NO: 21602 - protein, 56 aa, Artificial Sequence
  Synthetic
REVLERLEKELDRLRKDIERVADENRKINDTLRKRIEEVMARLDEINTDLKDRVET

SEQ ID NO: 21603 - protein, 56 aa, Artificial Sequence
  Synthetic
SSDEVLKEIEEIIRRLEEEVRRVNKEVNKSTEDLRREVEEVLRRTNELIEELERRV

SEQ ID NO: 21604 - protein, 59 aa, Artificial Sequence
  Synthetic
EEALRKAIKDVRDIVKKVKDELKEWRDRNKELVDRLSEELKEWLKDVERVLKELTDKDR

SEQ ID NO: 21605 - protein, 56 aa, Artificial Sequence
  Synthetic
SLEEVLERIKRIIDELKREAKRVLDETNTLIREVKKRLEDVNRDVNRLIEELRERV

SEQ ID NO: 21606 - protein, 57 aa, Artificial Sequence
  Synthetic
MVRDLERRIREVVKRLKEDLERWKKEVEDEIKRLEDRLKEWLDRVREMLEKLREEDR

SEQ ID NO: 21607 - protein, 56 aa, Artificial Sequence
  Synthetic
SSEEVLKTIKDIIDELRKEAEEVLRRTNESTKELEERAEEVNKRVNDSTRELAKKV

SEQ ID NO: 21608 - protein, 59 aa, Artificial Sequence
  Synthetic
EEMLDEVKKRAEKVVEDLRRELRKWLEDNKRLVEKLEKELRDWLKENKELVKELEDRDR

SEQ ID NO: 21609 - protein, 56 aa, Artificial Sequence
  Synthetic
SSEEVLDTLRKLIEDLRRRAEEVLERTNRSTDELRKRVEKVLEETNRLIKKVEDDI

SEQ ID NO: 21610 - protein, 59 aa, Artificial Sequence
  Synthetic
EDMLREALERIKEIIDRLERELEEWIKTNEDLVRRLTEDLERWLRTVAEILKRLKDEDD

SEQ ID NO: 21611 - protein, 60 aa, Artificial Sequence
  Synthetic
DELERVEEEIKKLSDDSRRVIEEVRRRLEESNKDLERRLREVEKRLKELTDDIKRTAERN

SEQ ID NO: 21612 - protein, 59 aa, Artificial Sequence
  Synthetic
RELLRKLLDDVRRVVERNKRKLRKDLEDNKREIERVKREADKDLEDHERVIRKLKEDIR

SEQ ID NO: 21613 - protein, 60 aa, Artificial Sequence
  Synthetic
DELERVVEEIRELSRDSERAIEEVRRELKRTNDENRESAKRVAEELKKLTDKIKEEADRN

SEQ ID NO: 21614 - protein, 59 aa, Artificial Sequence
  Synthetic
RELLRELLKEVRRVVEENKRRLEEDLKKNRKKIDDSNKELRKDLEDHRRVIEKLEREIR

SEQ ID NO: 21615 - protein, 58 aa, Artificial Sequence
  Synthetic
DELEKVKEDIKRLLDDVRREVEKVNRDSRRLLEDLRRVVKEVSDRSKELAEDLERKVG

SEQ ID NO: 21616 - protein, 56 aa, Artificial Sequence
  Synthetic
VEDVLREVKRLAEEVKKETKRVLDEIKKLVEDVARELERILEDSERLIREVEKRAT

SEQ ID NO: 21617 - protein, 58 aa, Artificial Sequence
  Synthetic
DEIEDVLRRAKKLLDDLRRVVKKANDDSRRLLKKLKDKVEEVSRRSRRLAEDLERTVG

SEQ ID NO: 21618 - protein, 56 aa, Artificial Sequence
  Synthetic
VEDVLREVRKIIEDVKRASEKILEESRKLIEDVERRLEEILKRSEDLIRTVKERKR

SEQ ID NO: 21619 - protein, 60 aa, Artificial Sequence
  Synthetic
DELERVLEEIKRLLDDVHRESKRVNEESERLVKKLHDDSRRVLTEIKKLLDDVRRVVEEL

SEQ ID NO: 21620 - protein, 58 aa, Artificial Sequence
  Synthetic
EKVEEILRRVRELVKKWKTELERALEENEREVERWKRDLDRILEEVRRVVERVEREIR

SEQ ID NO: 21621 - protein, 59 aa, Artificial Sequence
  Synthetic
DELEKLLEDIRRELKRVREDDKRHNDKVKETLDRVRELIKRLLELIKKVADEIRSLKRR

SEQ ID NO: 21622 - protein, 58 aa, Artificial Sequence
  Synthetic
REVEEVKRRIEEILKEAEETNRRSHEKAKRVLEELKDIVRKVLEELRRLLRELEEEVR

SEQ ID NO: 21623 - protein, 59 aa, Artificial Sequence
  Synthetic
EELERLREEIKKILDEARERDETLLREIRREHEKNKRADEEHNRRVEETLERIERLAER

SEQ ID NO: 21624 - protein, 58 aa, Artificial Sequence
  Synthetic
EEVRAVERELRKILDEIRKTNKEVHDRIRELLERSKRSNDESHKKVEDVLRELKKRVD

SEQ ID NO: 21625 - protein, 59 aa, Artificial Sequence
  Synthetic
SETDEVRKELRKLLEDSRRAVEEVKKKLDDSNKEVRDRVRRIREELKKLEKEVREIKRK

SEQ ID NO: 21626 - protein, 55 aa, Artificial Sequence
  Synthetic
EELLKELEEVLKRLRELHKRTIDEVEKSAREVKDEIRRLEEELDRVLKKLEDALR

SEQ ID NO: 21627 - protein, 59 aa, Artificial Sequence
  Synthetic
SLDEDVERLIKELKDEARKLNEEMKEYVRDSERKVRRLNEEIRRLIEELKRKAEELKRG

SEQ ID NO: 21628 - protein, 55 aa, Artificial Sequence
  Synthetic
DRVKERLERVLDEAEKSNEETLRELDDVSRRIEESNRRTLAELEKVLRDIEKDVT

SEQ ID NO: 21629 - protein, 60 aa, Artificial Sequence
  Synthetic
SELEKLVEDLRRAAKESHERNEKLLDESRKTVEDVKRKLEEILRRSEEVVREIKKKKKDI

SEQ ID NO: 21630 - protein, 55 aa, Artificial Sequence
  Synthetic
EEVRRRVEKLIEENRRSSRRVEEEDKRLLKELKDAIKRVEEEDKKLVEELRRSEK

SEQ ID NO: 21631 - protein, 60 aa, Artificial Sequence
  Synthetic
KEVEDLVKEVKERIEESHKENKRILDKARRVVERVETDLRRILEESKRTVEDIERRKERI

SEQ ID NO: 21632 - protein, 55 aa, Artificial Sequence
  Synthetic
EEMKKAVDELIERNKRSSDRVREEAKKLIDRLEEVIEKVERDDEKLVRDLEEELR

SEQ ID NO: 21633 - protein, 61 aa, Artificial Sequence
  Synthetic
SSLETLEKIARDLLREVKETLDRVREESRRLLEEVRRVAEESRKEVERLLKELEEVIRREV

SEQ ID NO: 21634 - protein, 59 aa, Artificial Sequence
  Synthetic
DELLRELAERVRRVVKKIKDELRDDLRRTREEVERLKERHKELVKRVKEAVDKIREEIR

SEQ ID NO: 21635 - protein, 60 aa, Artificial Sequence
  Synthetic
KEVEEILRDVARLVEDNRRVLERILREVEKLIRDNEERLKEILERSKDLVRRIEELIRRG

SEQ ID NO: 21636 - protein, 55 aa, Artificial Sequence
  Synthetic
EEVRRAIEELLKDVERAYEEVVRRIEKLLDDLRRKYEEVKKENERLNRRVEEAAR

SEQ ID NO: 21637 - protein, 60 aa, Artificial Sequence
  Synthetic
DDVEDILRDVERLVEENRRRLEEIVRESEDKVRKNDETLKKILEDVKREVERVERAIERG

SEQ ID NO: 21638 - protein, 55 aa, Artificial Sequence
  Synthetic
KDVVRAIEELLKDVEEKYRRVSERNKELNKRVEDTYREVMKEIRRLLERVDRRAR

SEQ ID NO: 21639 - protein, 57 aa, Artificial Sequence
  Synthetic
TEVERLVERVKEIVEEHRKKLEELARRSEELVERHEKKLRDLLRESRELVERAKKEN

SEQ ID NO: 21640 - protein, 54 aa, Artificial Sequence
  Synthetic
EIKERLKELLREAEEVSRRVNKRNEDLLRRLEKVSREVNERNEDLLEELDRTVN

SEQ ID NO: 21641 - protein, 56 aa, Artificial Sequence
  Synthetic
DEVERLVEEVEKLVEEWIRDLERILDESRRTVEEWKKELKRLLDRSKRLVEDAKRK

SEQ ID NO: 21642 - protein, 54 aa, Artificial Sequence
  Synthetic
DIERRLERLMEELHRVSKEVLDADRELLKELHDVSREVNKRNEELLDELRKTVT

SEQ ID NO: 21643 - protein, 57 aa, Artificial Sequence
  Synthetic
DEVEETVKRVREEVERWKEELKRIADEVRRLVEKVKDDLRRLLDESRKLVEEVRREN

SEQ ID NO: 21644 - protein, 54 aa, Artificial Sequence
  Synthetic
EIKRRLEELLKELHKVSKDLDKILEELLREVEEVVRRVNETNKKLLKELDETVR

SEQ ID NO: 21645 - protein, 57 aa, Artificial Sequence
  Synthetic
SEVEELVKRAAELADEARKRLERIMEEVKRLVDEWEKELKKLLDESKELVEKVRREN

SEQ ID NO: 21646 - protein, 54 aa, Artificial Sequence
  Synthetic
KVREDLRRLLDTLRKVVEELKRRLRELLKKLHDVSRKVNEENERLLRELEETVR

SEQ ID NO: 21647 - protein, 57 aa, Artificial Sequence
  Synthetic
DEAEKLVDEVRELVRRHKETLKEILERVKELVKRWKDTLDKLLRDSEELVRRVKEEN

SEQ ID NO: 21648 - protein, 54 aa, Artificial Sequence
  Synthetic
RVKEELKRLLKELKEMSKRLTEELRRLLKELHDRSREVNERNKRLLEEVDRTVK

SEQ ID NO: 21649 - protein, 56 aa, Artificial Sequence
  Synthetic
DEIREVEERNRRSNEEMKKAVREVEKDIERVAREIRKRAEEVSKRNEDINREIRKT

SEQ ID NO: 21650 - protein, 59 aa, Artificial Sequence
  Synthetic
DETLRRVIRKSEELLKRLKDRLDEVRKRVEEILKRAEERLREVIKRSEELLEEVKRESD

SEQ ID NO: 21651 - protein, 56 aa, Artificial Sequence
  Synthetic
SLLEEVEKTLRKIVEDSDREIKRVSKKNKETVKRLEELMREVNRRSTEIVKRIRDS

SEQ ID NO: 21652 - protein, 59 aa, Artificial Sequence
  Synthetic
KEMLDRIIEEAKRLHEENKRKLEEVERRSEELLKELKRRLEELIKRNDDLLREVEERKR

SEQ ID NO: 21653 - protein, 60 aa, Artificial Sequence
  Synthetic
DEVEEVIRRAEELVKEVKKRLEELIRESEALLERVKRRLERLIEESRRRLEEVKKKVSSG

SEQ ID NO: 21654 - protein, 54 aa, Artificial Sequence
  Synthetic
EIKKRLRKLLEEIKKVVDDVRETNKRTLERLEELARRVNEENKKILDDLEEAVR

SEQ ID NO: 21655 - protein, 60 aa, Artificial Sequence
  Synthetic
KEVDEVVKRAEDLLREVKKRLDEVIEDSERLLREVRKRLEEIIRESEKLLEDVRKVVERG

SEQ ID NO: 21656 - protein, 54 aa, Artificial Sequence
  Synthetic
EIEKRLEEILREIKKLVEEVNRRNEDILRRLEREVEKVRRVNEKTLERIEETVR

SEQ ID NO: 21657 - protein, 60 aa, Artificial Sequence
  Synthetic
SLVEDIRRDVKRILKEIDKLVKDIEEENRRASRESERLVETIRREVKEVLDRIRKLVRDV

SEQ ID NO: 21658 - protein, 59 aa, Artificial Sequence
  Synthetic
RKLIEEIRRRLKKALEDIRRLIEESRKRVEESLTRSRKLAEDIRRELEDVLRKVDEDAK

SEQ ID NO: 21659 - protein, 56 aa, Artificial Sequence
  Synthetic
SRVKEVADRVRDIVRRIKDEIKEHVDRLRDVIRRIKEKLEEHSRRLREIVERIRAS

SEQ ID NO: 21660 - protein, 59 aa, Artificial Sequence
  Synthetic
EELLKRLEDIIRKLLEDIKRVVKELEEVSRTLLREIEELLEENRKSMEKLLRDIEEEAR

SEQ ID NO: 21661 - protein, 56 aa, Artificial Sequence
  Synthetic
SKVDEVVKRLEDAVREIKKEIDKHSKELADEVEKIKKELKDVSDRNREVVRRIREA

SEQ ID NO: 21662 - protein, 59 aa, Artificial Sequence
  Synthetic
EKKAEELRKRVDDLLEEIRRLLEENKRTVDKLLDEIKRVLEDHRRSVEELLREIDKDAK

SEQ ID NO: 21663 - protein, 56 aa, Artificial Sequence
  Synthetic
SEVDEVLREAKRIVDEVHKDNERATEESRRLVKKVHEENEEMVKDIERIVKEVKDA

SEQ ID NO: 21664 - protein, 55 aa, Artificial Sequence
  Synthetic
KELEREVEKLLKRIEESLRRHRKENKRLLEELDRSLRELAKIVKEVLDEIRERTR

SEQ ID NO: 21665 - protein, 56 aa, Artificial Sequence
  Synthetic
SEIEDAVRRIEKRVEEVHRENKKLTDESRKLVREVDEENKKVSRESKKLVEDARRR

SEQ ID NO: 21666 - protein, 55 aa, Artificial Sequence
  Synthetic
RELSEKVREVLEKIKKSLEDHRKANEDLLREIRDSLKKHRDENRRLLKELEETRK

SEQ ID NO: 21667 - protein, 57 aa, Artificial Sequence
  Synthetic
SDLDRVAKELTEIVERIIRELERLTEKSRDIVRKVHKENEDAVRKIRKIVEEVKRKK

SEQ ID NO: 21668 - protein, 55 aa, Artificial Sequence
  Synthetic
RELEKRVRDLLRRVEEALRRHKEENRKLLEDIKRSLEEVAKEVERVLKEIKDTAR

SEQ ID NO: 21669 - protein, 57 aa, Artificial Sequence
  Synthetic
SEMDDVLKKLAETVKRIIERLKKLTDDSRRLVEEVHRRNDKLSKESREAVRKAEERN

SEQ ID NO: 21670 - protein, 55 aa, Artificial Sequence
  Synthetic
RELSEEVKKLLDEVRKALKRHKDENDKLLKEIEDSLRRHKEENDRLLEKLKESTR

SEQ ID NO: 21671 - protein, 57 aa, Artificial Sequence
  Synthetic
DEAREILKEIRDIADELRKRLERLTERSERIVREVDKENRRVVEEIREIVERVKKAK

SEQ ID NO: 21672 - protein, 55 aa, Artificial Sequence
  Synthetic
RELKKEVERVLEEIRRLLEEHERANRKLLKEIRDSLRELKKRVEEVLREIKEATK

SEQ ID NO: 21673 - protein, 57 aa, Artificial Sequence
  Synthetic
SEAEEMLERIKRRVEEVNKENKKMTDESKKIAEDVDRDNREVLREIKRIVDEVRKRN

SEQ ID NO: 21674 - protein, 55 aa, Artificial Sequence
  Synthetic
KELEKEVERVLKEIKDSLRRHRKENEDILREIKESLDELDKEVKRVLKEIRDTAR

SEQ ID NO: 21675 - protein, 57 aa, Artificial Sequence
  Synthetic
SELEEVAKELRKTLEDSTRENKKHTDDVRRIVDEVDKRNRKAVEDIRKIVDEVRKRK

SEQ ID NO: 21676 - protein, 55 aa, Artificial Sequence
  Synthetic
RELEEIVKRLNERDKEVLEKDAEDVKRVLEEIKESLERVARDVERVLEDIKRATD

SEQ ID NO: 21677 - protein, 61 aa, Artificial Sequence
  Synthetic
SALEDLERKVEELIRRLDELLREHRETLERLIRELDKLLTDHHRRNRELLERIKDVVRKAG

SEQ ID NO: 21678 - protein, 59 aa, Artificial Sequence
  Synthetic
EDKLRKIVEELERLVDEVRRSLEKASKRLKDLVKEVKKRLEDITRESEELVRRVEERTR

SEQ ID NO: 21679 - protein, 61 aa, Artificial Sequence
  Synthetic
SALEELKKEIKRVIEELKRALERHHKENEELRKRIDEVLKEHHDANRRLLEEIKELVRRAG

SEQ ID NO: 21680 - protein, 59 aa, Artificial Sequence
  Synthetic
EEKLKEIVKEIRKKVEELKDDLRRMSEESRRLVEELEERLRRLTERSKRLVEDVRRRVT

SEQ ID NO: 21681 - protein, 56 aa, Artificial Sequence
  Synthetic
SEKEELDRKIEDVRKKVEETSRKLKRVNDESKKEVKRTSDELRKKSKEVNEAVERE

SEQ ID NO: 21682 - protein, 56 aa, Artificial Sequence
  Synthetic
VEEAIRRLKETLDRHREEVEDLIRKSREVLKRHEERVRELIKRHEDTLRELKKRAK

SEQ ID NO: 21683 - protein, 60 aa, Artificial Sequence
  Synthetic
SEVDELMKRLKDEAEDIKEKVERLIREWEEAARKIAERVEKLVRDWERVIETLRDLKKRV

SEQ ID NO: 21684 - protein, 59 aa, Artificial Sequence
  Synthetic
KDLAERLRRVLREVERLVRTVNKKHREVLEEIRKEVERVNDEHRRVLEEIKRRVEKDVK

SEQ ID NO: 21685 - protein, 60 aa, Artificial Sequence
  Synthetic
SAEEKLDTEVRRIAEEVKRIIDELRKVTEEVEKRIREINKTSEDTSREVKKTIREVLKRL

SEQ ID NO: 21686 - protein, 59 aa, Artificial Sequence
  Synthetic
EDTVEEVLERLRRALEKADKLVKDHIKRLKDVLRAIEEDHRRHLERLRRMLEEIKKEVT

SEQ ID NO: 21687 - protein, 60 aa, Artificial Sequence
  Synthetic
SVEEKLTREAERLLKRIEEVIRRLRDANRRSADRIRRIDEKTRREVEKLKKKIRELAKRV

SEQ ID NO: 21688 - protein, 58 aa, Artificial Sequence
  Synthetic
DLVEKVIKTMRKIVEDLERDVRKVIRDDEELVERLRRENEEVIKKLREIVKRLEDETR

SEQ ID NO: 21689 - protein, 60 aa, Artificial Sequence
  Synthetic
SLIERLREVAEDLKRRIRKVLEDLRRANEESAKRIRDIDRRTREANRESNERIKEIAKRV

SEQ ID NO: 21690 - protein, 58 aa, Artificial Sequence
  Synthetic
EKVKKVIDDMERIVREIEEKIKRVIERDKKLVKKLEEDNRRVIKKDKDLVRRLEERTR

SEQ ID NO: 21691 - protein, 57 aa, Artificial Sequence
  Synthetic
SLKERLRDDAKRLLDEDRKVLEDLERRAKEINDRNEEIVKKLRDKVREILERIDREV

SEQ ID NO: 21692 - protein, 59 aa, Artificial Sequence
  Synthetic
EEVIRRILEELRELVERSERTVRDIERELDELIDKSRRDVEEIIKDLERELEELKRKTK

SEQ ID NO: 21693 - protein, 57 aa, Artificial Sequence
  Synthetic
RVREELEKAAEEVRRRDRRVLEELEKEVRRINEDNKRVHETSREVVERILETIDRRV

SEQ ID NO: 21694 - protein, 59 aa, Artificial Sequence
  Synthetic
EDVIRKIVRELEELVRESKETVDDIIRRLEELIRKSREDNRKIVEELKKLLDDLTREEK

SEQ ID NO: 21695 - protein, 57 aa, Artificial Sequence
  Synthetic
SLKETLEEVVKRVLETDKRLLEKNDRTVREVNERNRRVHEESRRAVERILEEIDREV

SEQ ID NO: 21696 - protein, 59 aa, Artificial Sequence
  Synthetic
EDTIRRIAKEADDLLEDSRRKVEDNSRRLKRLLEESKKSNEEIVRRLEDLLRRLKKESE

SEQ ID NO: 21697 - protein, 57 aa, Artificial Sequence
  Synthetic
SLKEELEEDVKRINDRNEEVLKRLREVAKKLLDDDRKLLKELKKVVEDVLRDVDREV

SEQ ID NO: 21698 - protein, 59 aa, Artificial Sequence
  Synthetic
AEVIKKILEELEKLIKDSEDTAREIIKELKELVERSKRKVEEILKELEDLLEELKRRAD

SEQ ID NO: 21699 - protein, 57 aa, Artificial Sequence
  Synthetic
SMEEKAEEVIKEVDEENKRLIEEAEKVIEDVEREDRRLVDELRKVIEKVERTIERDL

SEQ ID NO: 21700 - protein, 59 aa, Artificial Sequence
  Synthetic
KDVIEEIIERLRRHVEDSEEKIRRIIRRLEEVLKRSKEDIERIIEELERLLDEMRERAR

SEQ ID NO: 21701 - protein, 58 aa, Artificial Sequence
  Synthetic
DMDRKLKEEIKRAERRDKELVKDIERVIEEVLRANKELIERIEKVIDDVRREIEKRLK

SEQ ID NO: 21702 - protein, 59 aa, Artificial Sequence
  Synthetic
KDVIEEIIERIKDILRESEREIRRIIKELREHLKKSADRIEKIRRELERLLEKLEDDAR

SEQ ID NO: 21703 - protein, 61 aa, Artificial Sequence
  Synthetic
SEIEKILRELEEHIKDSEREHRELVERLRDHIRRSKEEHRDLIRKLEERIREVERRVRKDG

SEQ ID NO: 21704 - protein, 59 aa, Artificial Sequence
  Synthetic
KELKDRLKRVSEEHKRRIEDLLRRTKRVSERHREEIRKLLETTERAIKKARETIERLRK

SEQ ID NO: 21705 - protein, 61 aa, Artificial Sequence
  Synthetic
SEIDRLLERLEDHIRKSAKRHRDLVEELREHAERLKRDIERLLEELEKTVRDIEKEVRERG

SEQ ID NO: 21706 - protein, 59 aa, Artificial Sequence
  Synthetic
EDMKRKLEKVSEEHERKIKELLDRTKRASEEHDERVKRLLDELRRVLKEAEERLRELKR

SEQ ID NO: 21707 - protein, 61 aa, Artificial Sequence
  Synthetic
ERIDRIIKELEDLVDESRKRNDDLVRELKKHIKESKDEHDRLVEELDRFVEEVRKRVEKDG

SEQ ID NO: 21708 - protein, 59 aa, Artificial Sequence
  Synthetic
EDAIRKLEDVLRKVRETHERLLDKSRDVSRKHREDIKELLKKTKTVIDRVRKRIKELRK

SEQ ID NO: 21709 - protein, 60 aa, Artificial Sequence
  Synthetic
SEVERIEEELRREIEKVDRDNKKIVDEARRSIDELRKDVEDILRDLRRLVDEVEKMARRG

SEQ ID NO: 21710 - protein, 59 aa, Artificial Sequence
  Synthetic
EELLKRVEDVVDEVRKRLERIDEKTRKAVKEVTDRNDELLKRVREVVKEVRARLEEIRR

SEQ ID NO: 21711 - protein, 56 aa, Artificial Sequence
  Synthetic
SEKEKVDKVVKKVAKRIKDLLDEIKRVADESNERLERLLRRLEEASKRSKKKLKDD

SEQ ID NO: 21712 - protein, 56 aa, Artificial Sequence
  Synthetic
VDTLIKELEDRIDEVEKRIRELIERDKRLVEEVERRIAELIRRDERLVEELKKREE

SEQ ID NO: 21713 - protein, 56 aa, Artificial Sequence
  Synthetic
SEKEKLKDVVRDVERLIKELMERLERVHERTNREITRLLEDARRAMERSNKKLTDL

SEQ ID NO: 21714 - protein, 56 aa, Artificial Sequence
  Synthetic
VDDLLRRLKELIERVRKLIEDSIKELRDIVKEVKDRIKTLIERDKELVKRLEDRAR

SEQ ID NO: 21715 - protein, 57 aa, Artificial Sequence
  Synthetic
SEVDKLVRDLERHIEEAKRRVEELLKEIKKLVEDTKREAKKLLDTLRKKVEDVEREN

SEQ ID NO: 21716 - protein, 59 aa, Artificial Sequence
  Synthetic
EEMLRKMREVSERHKKTIDELRKELKKVLDEWRRRSEKIFEELDEVLKRVEERVKEVER

SEQ ID NO: 21717 - protein, 57 aa, Artificial Sequence
  Synthetic
SEVDELVRRLREHIRRAKERVEELIKRIKTLAKETTDRARKLIEDLKRHIDDARRKN

SEQ ID NO: 21718 - protein, 59 aa, Artificial Sequence
  Synthetic
REVLKKIKEVSDEHRKEIERLRKRLEEVLREWEDTSREVLERLKEVSKRHRDEIREVAR

SEQ ID NO: 21719 - protein, 57 aa, Artificial Sequence
  Synthetic
SEMEDLIRRLREHIEDVRRKVEELIRELEDHIRRAEESVKKREDDLRRHIEEVRKRN

SEQ ID NO: 21720 - protein, 59 aa, Artificial Sequence
  Synthetic
KEVLDEARRVSKEHKDTLEKLLRKAEEASERHKREIERLLKELKEVSEEHRRRIDEVRR

SEQ ID NO: 21721 - protein, 55 aa, Artificial Sequence
  Synthetic
SEVEELIEDLKRHLKEVADRVEELERELRKHLEEHHRRVREIIRRLEDLLRKAEE

SEQ ID NO: 21722 - protein, 59 aa, Artificial Sequence
  Synthetic
EDLKRRIEKVSRDHERTVEKLVRDLERVSREHERTVKENKERIKKVLDDARKRVDEVKK

SEQ ID NO: 21723 - protein, 59 aa, Artificial Sequence
  Synthetic
SEVEKLVRELEDVLRKIERKVRELSKDNKRVLDENKKRVEDVSRDNERAMREIEELRRK

SEQ ID NO: 21724 - protein, 55 aa, Artificial Sequence
  Synthetic
EELKKVLEDVKREVEKLLEEIKRSLEEARKTVKESNDEIRESLERLEEKVRRIEK

SEQ ID NO: 21725 - protein, 59 aa, Artificial Sequence
  Synthetic
DEVKDLVKRLEEVIKRIDEVVKEVDRRNREVLERNRELVERSIRELREVLDRIRRRKKD

SEQ ID NO: 21726 - protein, 55 aa, Artificial Sequence
  Synthetic
SELDKVLEDVKRKVEEILRRIKRSLDEVERDVRRSNEENKKVTKEVREAAEEIKR

SEQ ID NO: 21727 - protein, 59 aa, Artificial Sequence
  Synthetic
DEVEELVRRLREVLEEIRELVERVNDRNRRVLEENRELVTRSIEELRRALERIERLSKD

SEQ ID NO: 21728 - protein, 55 aa, Artificial Sequence
  Synthetic
EKLKKVLEEVERRAKKLLRDIEESLRRVAREVERSNEENKKVTKEVADAVREIER

SEQ ID NO: 21729 - protein, 57 aa, Artificial Sequence
  Synthetic
DEEKKARDVLERWRKRSEDLLRKAEDVLREWRERSERSFKRLRDVLEEARKRVEELN

SEQ ID NO: 21730 - protein, 55 aa, Artificial Sequence
  Synthetic
DELVREIEEVVKETEKRVEELIKEIREMVKKNEREVREIERRLEETLEKIDRDRK

SEQ ID NO: 21731 - protein, 57 aa, Artificial Sequence
  Synthetic
SEEEEIEKALRDWREELKRLLETIERLLREWKRRVEELKKRIEEALKELKKILDDKG

SEQ ID NO: 21732 - protein, 56 aa, Artificial Sequence
  Synthetic
VEEVKKKLEKEIKKNRENVDRLRRRLEEEVKRNERSVEEIKRRLDEIARELDERKK

SEQ ID NO: 21733 - protein, 57 aa, Artificial Sequence
  Synthetic
SEDEEIKEALKEWRDEVRRLEEKIRRVLEKWERDVRRLKEEIKKSNEDLRRRLEEKG

SEQ ID NO: 21734 - protein, 56 aa, Artificial Sequence
  Synthetic
VEEVKKRLKRLIEENRKNVKRLEERIREAVKKNEKSVEDSERENRDIARELDEKRK

SEQ ID NO: 21735 - protein, 60 aa, Artificial Sequence
  Synthetic
EEVERLKERLERLSERSKEIAKRVHEENKKLSEESRKLVEDVHRENEEAAKRLEDVARRN

SEQ ID NO: 21736 - protein, 59 aa, Artificial Sequence
  Synthetic
RELLERLRRVLEEHREVNERILEEIKRSLDEHKDTNRKLLEEIEKSLRDLEEIVRRLEK

SEQ ID NO: 21737 - protein, 60 aa, Artificial Sequence
  Synthetic
REIEEIEKEVRDVSKESEDIVRTVHDENRRASERSRELVKRVDEENRKAVEDLERVAREN

SEQ ID NO: 21738 - protein, 59 aa, Artificial Sequence
  Synthetic
DELLRRVRKLLEDHKRVNERLLEEIEKSLKRHREENERLLEEIRKSLEDVERVVEEIKR

SEQ ID NO: 21739 - protein, 60 aa, Artificial Sequence
  Synthetic
SELEELEKRLRKAVRDLEEIVDRVRKDLERASDDSRRIVEEVHRENRKVAKELKEVRDRN

SEQ ID NO: 21740 - protein, 59 aa, Artificial Sequence
  Synthetic
EELLEALERLLRELEKIVRKLLRELEEMLRRHEKTNRELLERIRRSLEELAKIVEDLET

SEQ ID NO: 21741 - protein, 60 aa, Artificial Sequence
  Synthetic
DEIEEIKKELDELSKRSEKIVRDLERELREASKESERLVRKVHDDNRKALEELRDVRRRN

SEQ ID NO: 21742 - protein, 59 aa, Artificial Sequence
  Synthetic
DELLKEVRRALEEHERVNRELLERIRRVLEEHKRVNEELMREIDRSLKELAEIVKRLKD

SEQ ID NO: 21743 - protein, 60 aa, Artificial Sequence
  Synthetic
DELEELRKELKKMVDEIEEIVRRVDKENRDASRESEELVERIVEEVRKAVTELKELKKRN

SEQ ID NO: 21744 - protein, 59 aa, Artificial Sequence
  Synthetic
DELLKEVRKALERLKEEVKRVLEDIRRSLEEHRKVNERALRRIEEVLRDLERIVEEVKT

SEQ ID NO: 21745 - protein, 60 aa, Artificial Sequence
  Synthetic
SEVERLKDELRKASEELKKEVEEIEKRLREMSERSRKLVEELKRTLKEIEKELKDIVRKD

SEQ ID NO: 21746 - protein, 59 aa, Artificial Sequence
  Synthetic
DRLKEEVERVLREHEKSLERLRERLKELLERHHKTNEELLREIKEALERLEKIVKDLTD

SEQ ID NO: 21747 - protein, 60 aa, Artificial Sequence
  Synthetic
DEVEDAERRLREMSERIEDLVRRVEERLRRMSEESKKLVEDVKRENDKSVEELDRIVRRD

SEQ ID NO: 21748 - protein, 59 aa, Artificial Sequence
  Synthetic
DRLKERLEKLLRDHRRSVEEVIKKLDRLLKEHHKVNEKLLRDIDKSAKEVKKVVEDKTR

SEQ ID NO: 21749 - protein, 60 aa, Artificial Sequence
  Synthetic
SEVEEAEKELREMSKTSTRLVEELEERLRRASETLKKLVDDVKRELDKRLEDIDRRVARN

SEQ ID NO: 21750 - protein, 59 aa, Artificial Sequence
  Synthetic
DRLKERVDRLLEEHHKVNKRLLERIEEVLRRHETTLRELIKEIDKLLRDLKKRIDDVKK

SEQ ID NO: 21751 - protein, 60 aa, Artificial Sequence
  Synthetic
DEVREVKKELKKIAEELRKLIEEVREELRKMSKRSEELVRELKKRNEKSVRDLERIVRKD

SEQ ID NO: 21752 - protein, 59 aa, Artificial Sequence
  Synthetic
DKLKEELKEALKDLERELKELIEELKRLLDEHHKRNEDLLREIDKSVRKVEEDVRRLKK

SEQ ID NO: 21753 - protein, 60 aa, Artificial Sequence
  Synthetic
SEVDEVRKELERLVREIKKLVEDSKRNLDRLSKELEERVRDLERDARRLVKELRDLLKEN

SEQ ID NO: 21754 - protein, 59 aa, Artificial Sequence
  Synthetic
KEVRDDVRRLIREVDEELKKAKEDLDRAHEEHEKSTERLRERIKEVVDRVREDIERTKN

SEQ ID NO: 21755 - protein, 56 aa, Artificial Sequence
  Synthetic
DEERRIEKVLKEWEKRTRDLARELERVNREHKKTSEDVLKKLEEINREVRRVVKEE

SEQ ID NO: 21756 - protein, 56 aa, Artificial Sequence
  Synthetic
VEKLRRLIEEVIREDERRVERVKRNNKRLSEETEKLVEDVRRNNERLVKEVRDRSR

SEQ ID NO: 21757 - protein, 56 aa, Artificial Sequence
  Synthetic
SEEEEIKKVLDEWRRRTEELRKDLDRVLEEDRRSVEEVKRRLDKVNEELRRRIDEL

SEQ ID NO: 21758 - protein, 56 aa, Artificial Sequence
  Synthetic
VERAKEEIKKVIKEDEDLVRRVRKYIEENSDELRRLVEEARKNNTRIAKEAEDTSR

SEQ ID NO: 21759 - protein, 56 aa, Artificial Sequence
  Synthetic
SEKEEIDKVLKEWEEMTRRLVEELKKSHDEDRESVKRLLERLRDVNRELKEIIDRA

SEQ ID NO: 21760 - protein, 56 aa, Artificial Sequence
  Synthetic
VEKAKETVRKVIKEDRDLVREFKKYNEENSDRMRKLVKDIKENNRRIVEEARERSR

SEQ ID NO: 21761 - protein, 56 aa, Artificial Sequence
  Synthetic
SKEEKLREALKKVRKDVKDLERHIDRSVKRNKEEVDKAKRELERSLEELRRRLEEL

SEQ ID NO: 21762 - protein, 56 aa, Artificial Sequence
  Synthetic
VEELLERLERTLRRMREKVRKLDKENKDHTEKVKEDVKRVHDENDKVREDVDRKDK

SEQ ID NO: 21763 - protein, 60 aa, Artificial Sequence
  Synthetic
REVEELVKEIERVLEETKKRSEDTKREVEKVLEDTKRLVERLRKTLEELLRELDKRVRSG

SEQ ID NO: 21764 - protein, 59 aa, Artificial Sequence
  Synthetic
EELRRTLEKVLREWRDVNRKVNDTDRKVLEDWERVNRTVNEELKEVLERAKEDIDRVAT

SEQ ID NO: 21765 - protein, 60 aa, Artificial Sequence
  Synthetic
DEVERLVEEIKKRIDETRKLLEELKKRIRKVLEETKDLVRRLLKRLRELLKELEERRRRG

SEQ ID NO: 21766 - protein, 59 aa, Artificial Sequence
  Synthetic
EELRRELKRVLDEWKKANDEVRRAMEEILKEWEEVNRKVNKDLRDVLEEVKERLREVAK

SEQ ID NO: 21767 - protein, 60 aa, Artificial Sequence
  Synthetic
SEVEKLKKRLRDLLEELKRLSRRTKEDVRRVIKETRDRSKKTKEELEKLLREIRELRKRG

SEQ ID NO: 21768 - protein, 59 aa, Artificial Sequence
  Synthetic
EDLRTEIKKILEEVKREIDRVRETDEKVLRDWKKANDEVRETDREVLRKIREDLKEVAR

SEQ ID NO: 21769 - protein, 57 aa, Artificial Sequence
  Synthetic
RERETIEKVLDENRKSLEEVTETVKRVLDRWDETLKRLEEEVRRVNDKTRKVLEDLL

SEQ ID NO: 21770 - protein, 56 aa, Artificial Sequence
  Synthetic
VKELKKRVKELSEKLREVLEELERRVREIVKRNKETVDESRKRNEELIKRAEDAAK

SEQ ID NO: 21771 - protein, 60 aa, Artificial Sequence
  Synthetic
SEIDEVRKRVEKHSRDAKRLVDELREKNDRAIKTLERLLRELEKRNKKVIRDLEDVRTKN

SEQ ID NO: 21772 - protein, 59 aa, Artificial Sequence
  Synthetic
EDMVRELRRVLKENDESVRRLKREIEEVHKETERVVKEVLEEIRRVDEELKDVARKVET

SEQ ID NO: 21773 - protein, 60 aa, Artificial Sequence
  Synthetic
REIEEVIKELKRHSEELEKELDRLRRENKEAIRTSKKLVEDLRRENTRAKEELEDVKREN

SEQ ID NO: 21774 - protein, 59 aa, Artificial Sequence
  Synthetic
ERALERLRRVVRENEESVERVLKKIDDIHEETKRVSDRSEKEIEDVDRDLKRKVEEVEK

SEQ ID NO: 21775 - protein, 63 aa, Artificial Sequence
  Synthetic
REREKIKRILDELRKRVEELNRRNEELLRRLDKVVRDVNRTNKRLLEKLRKVADDVRRKLKDE

SEQ ID NO: 21776 - protein, 56 aa, Artificial Sequence
  Synthetic
VDKVERTVEEIEKELTRLVEESEKEVKRIIEELKELLERSRKSVEDIIREVRKLAE

SEQ ID NO: 21777 - protein, 60 aa, Artificial Sequence
  Synthetic
SEEEKLDRLLEELKKVAEEVNRENEKLLEDLERVVRDLNEKNKAALKKLEDAVRRLKEAI

SEQ ID NO: 21778 - protein, 56 aa, Artificial Sequence
  Synthetic
VDRVEERLREIIKTLRKLLEDSKESVRKIIEELKRLVDRSIEDLERIIKELEDKVR

SEQ ID NO: 21779 - protein, 60 aa, Artificial Sequence
  Synthetic
DRERRIETVLRKLKKVVEEVNRRNEKLLDDLRKVVTRLLEEDRRLLEKLRRAAERLKEEL

SEQ ID NO: 21780 - protein, 56 aa, Artificial Sequence
  Synthetic
VTRVKEKIEKIIEELKKLLKDSKKRVEEIIRELEKLVDDSRREVEEIIKELKDRSR

SEQ ID NO: 21781 - protein, 60 aa, Artificial Sequence
  Synthetic
DMREELERILKTLRDVSRESRRELKRLLDENEKTIREVKKRVDEILEKLRKVIDDVRRQG

SEQ ID NO: 21782 - protein, 59 aa, Artificial Sequence
  Synthetic
KKVVDEVDKEIRELIRKDEEIVKEVAERVKKNSEDLRRLLEKARREIEEIIKELEERRR

SEQ ID NO: 21783 - protein, 60 aa, Artificial Sequence
  Synthetic
DEDEIVRDVIRRLDEVLKKLEKTNTELDEELKRVVEELRKVNRTVDEELKRVLDELAKRI

SEQ ID NO: 21784 - protein, 55 aa, Artificial Sequence
  Synthetic
DKLVKDLKRVLDKLEESSRRMLKKLSDALRELEKSSDKVVKDLRKVLKELREEVK

SEQ ID NO: 21785 - protein, 60 aa, Artificial Sequence
  Synthetic
DEDERVEELLRELEEVLDRLAKLNKKLDERNKEVAEESKRLNETVDRELKEVLKRLEEKL

SEQ ID NO: 21786 - protein, 55 aa, Artificial Sequence
  Synthetic
SELVERIRRELERLKRSSEEVVKKLTEELKKDKKSSEEVVKDLRRALRELERAVD

SEQ ID NO: 21787 - protein, 60 aa, Artificial Sequence
  Synthetic
SELEKVKEDIRRLLKRLKEDIKRIKDEIDRLLEELKRHLKEVEEEVDRILEELKDLKRRG

SEQ ID NO: 21788 - protein, 55 aa, Artificial Sequence
  Synthetic
EKLERVKEDVERVLEEYRKRSEDLARRVEKVLREYKKRSDELEKRVEDVIKEVAD

SEQ ID NO: 21789 - protein, 60 aa, Artificial Sequence
  Synthetic
KELEEVARKIDEELKKLDKNIRDIADEIRRILEELEKDLREIEKRIRDILRRLEDLKRRG

SEQ ID NO: 21790 - protein, 55 aa, Artificial Sequence
  Synthetic
DELKTVEDKVRKALREYEEKTRKVKKDVDEVIKKYKTDSDRVLDEVEKALREVER

SEQ ID NO: 21791 - protein, 59 aa, Artificial Sequence
  Synthetic
RVEEKLKRVSDELKRAVDESNKKIEELLERLKRVHDETNKEITEILRELKEVVDKARED

SEQ ID NO: 21792 - protein, 59 aa, Artificial Sequence
  Synthetic
DELVEDIERKIEELIRRDDDLVRRAEEEVEKSIRELRRLVDEVRKEIKKIVKKIEDDVR

SEQ ID NO: 21793 - protein, 60 aa, Artificial Sequence
  Synthetic
SREDKARELLRELEKVDDDHRRRVRELLERLKKVLEDHRRAVKDIIKRLDDELKRIKEED

SEQ ID NO: 21794 - protein, 55 aa, Artificial Sequence
  Synthetic
EEVAKEVKDIVREVEDHLRRVEEEVRRIIREVEEHIRDLERRVRELLEELKRRSK

SEQ ID NO: 21795 - protein, 60 aa, Artificial Sequence
  Synthetic
SEEEKVRRLKEELRRVIEKHKKDVKEIEDRLREVDDRHRREVKKLIEELKKVLEDAKRRK

SEQ ID NO: 21796 - protein, 55 aa, Artificial Sequence
  Synthetic
EEVAKRVKEIIEKVERHITEVKKRAEELVEEVERHIRELKKRVEDLVEEIERDTK

SEQ ID NO: 21797 - protein, 61 aa, Artificial Sequence
  Synthetic
DEKETAEELLRRIEKVIKRLEDTMRKLNKKLKEAIERHHRTAKKLLDDIERVIREVEKDRG

SEQ ID NO: 21798 - protein, 56 aa, Artificial Sequence
  Synthetic
REELEDDVRRIIEEIDRLLRESEEDHEDLIRRLKRSLEELKRLAEDIIRKLSEDRK

SEQ ID NO: 21799 - protein, 61 aa, Artificial Sequence
  Synthetic
REKEAAKRILDRIEKVIRDHHREAKRLNDELEKVIREHHETVKELLKRIKEVIDKFKKDKG

SEQ ID NO: 21800 - protein, 56 aa, Artificial Sequence
  Synthetic
VEELEETARRIIEKLKKSLEDSKRDHERLKKEIEDSLKRLTELVKKIIEEIERDRK

SEQ ID NO: 21801 - protein, 61 aa, Artificial Sequence
  Synthetic
DEDEEARRLLEEIRKVIEEAEEEAKRLNERLRRVIKEHHRKVKELLDEIERVIEKVLRARG

SEQ ID NO: 21802 - protein, 56 aa, Artificial Sequence
  Synthetic
VDELRERVREIKEKLRKDLKDSEDDHRRMEEEIKKSLERLERLVREIIKDLEEKLR

SEQ ID NO: 21803 - protein, 61 aa, Artificial Sequence
  Synthetic
KDEERAKRLLDEIERVIRRHHKTARDLNRELERVLKEHHDTARKLLEDIKKAIDDLKRTRG

SEQ ID NO: 21804 - protein, 56 aa, Artificial Sequence
  Synthetic
AKELEDKVKEIIDRIEKSLEESDKNHKKLIRELEKSLDDLRREAKEIIDDAREKAK

SEQ ID NO: 21805 - protein, 60 aa, Artificial Sequence
  Synthetic
SAAERAEEVLRKLRESLERHKKVNKDLLEEIERSLREVAKDVDRVLKDIKRVLDELKRRR

SEQ ID NO: 21806 - protein, 55 aa, Artificial Sequence
  Synthetic
DEVEELVRRVHRENEKFSKESEDLVREVHERNKELVKRIRKILEDATRELEKAAK

SEQ ID NO: 21807 - protein, 60 aa, Artificial Sequence
  Synthetic
DMKEEAEEVLKEIEEVLKEHRDINRRLLEEIKKSLEDLSREVERVLDEIRRLLKRAVEER

SEQ ID NO: 21808 - protein, 55 aa, Artificial Sequence
  Synthetic
EEVRKIVEDLKKRLKELSEKSERIVRKVHRDNERVVREIRDIVRRLKKRLEDATR

SEQ ID NO: 21809 - protein, 60 aa, Artificial Sequence
  Synthetic
SAKEKVDEVLRRIKELLDRHKKVNEEILEEIRRSLEEHREVNERLLETIDRLLKELKRSR

SEQ ID NO: 21810 - protein, 55 aa, Artificial Sequence
  Synthetic
EEVEEIMRRAEEELRKLSKESRELVKRLHERNEEMSRRSKKIVDEAKKELEDAER

SEQ ID NO: 21811 - protein, 60 aa, Artificial Sequence
  Synthetic
SAEEELDRLEKELDKLLKEHHEENKRLLEEIDRVLKEHEETLRRLIKELREVLKEVKEKL

SEQ ID NO: 21812 - protein, 56 aa, Artificial Sequence
  Synthetic
VEKLREDVERVKRELEDLTRKSEELVKRLKDTLRRVSEELKRRVDEAKKEAREVER

SEQ ID NO: 21813 - protein, 60 aa, Artificial Sequence
  Synthetic
SAEEELKRLLEENERVTEEHHKRNRDLLRRIDEALRRHEKTLEDLIRELDRVLRELERRL

SEQ ID NO: 21814 - protein, 56 aa, Artificial Sequence
  Synthetic
VDDLRRIIEESRRRHEELTKESEKLVREVEDILRRLSEELAELVKRVKDKLDEDAK

SEQ ID NO: 21815 - protein, 60 aa, Artificial Sequence
  Synthetic
SAEETLKRLAERIRKLLEEHRETVKRVIDRLDKVLRDHHRENKRLLEDIDRVLRRLEESL

SEQ ID NO: 21816 - protein, 56 aa, Artificial Sequence
  Synthetic
VEDLDRRVKEVERRLREMSKTIEKLVKDIERELKEASEESRELVERMKRELTEAEK

SEQ ID NO: 21817 - protein, 60 aa, Artificial Sequence
  Synthetic
REIEEILKEIEKSLRDLEEEVRRILEEIKKSLEDLRESMERIVEEVDRRLRTLKEVFDRG

SEQ ID NO: 21818 - protein, 59 aa, Artificial Sequence
  Synthetic
DRVRRIIEKLEEDLRRVNKKIKETLEEAAKRLEDADREIEKILRDLARKIRKVLEEIKK

SEQ ID NO: 21819 - protein, 60 aa, Artificial Sequence
  Synthetic
SEVEEIERRIEKSLKELRERLEEAEKRHEELLERLEREIDRIEKELRKDLKRLRDMTRRG

SEQ ID NO: 21820 - protein, 59 aa, Artificial Sequence
  Synthetic
ERVKKEIDRLEKRLEEVNEEIKKRLKELAERSRRVLERIKDRIRRAAEELKRVLDEVRT

SEQ ID NO: 21821 - protein, 60 aa, Artificial Sequence
  Synthetic
SEIEEILKRLKELLKELKERNEDILRRVEKSLKDLRKKLEEIVRDLRRLLEELREMVKRG

SEQ ID NO: 21822 - protein, 59 aa, Artificial Sequence
  Synthetic
DRVREIIKTAEKELEKALRTSEDIDRRLEERLEKVNKEIREELRRAEEEIKRVLEEVKR

SEQ ID NO: 21823 - protein, 60 aa, Artificial Sequence
  Synthetic
DELDRIRKEVKRISDKNRRHVERLDEEVRKLLEELRKHLEDLTREVERLLRELKEVKKEG

SEQ ID NO: 21824 - protein, 59 aa, Artificial Sequence
  Synthetic
EEMRTKVEELRKRLEESLEEHKRAADELRKRLKKVLEEHEKRVRELEEELRRVLKEAED

SEQ ID NO: 21825 - protein, 60 aa, Artificial Sequence
  Synthetic
DELEELRKLVEEISRENREHLKKLKKLVEDLSRENEKHLRDVDKRVKELLEDLERLTRRG

SEQ ID NO: 21826 - protein, 59 aa, Artificial Sequence
  Synthetic
EDVERELRRLKKELDKSLKEHRTTLERLEEELRKSNKEHRDRVKELREELEKVLRDAKR

SEQ ID NO: 21827 - protein, 59 aa, Artificial Sequence
  Synthetic
SMLDEARKEVKELKDRVERASEKLEDNARRNVEKLERVSEELEREVKRLLDEIEEVKRR

SEQ ID NO: 21828 - protein, 56 aa, Artificial Sequence
  Synthetic
EETLKELERRIREVLKKHDKTLRDLERRIREVNKRHKDVSDRLAERIKKVIRELER

SEQ ID NO: 21829 - protein, 59 aa, Artificial Sequence
  Synthetic
DKEKELEREVDELLKRLEEHSKRVDKTVEDVHRRNEEALRDMERKVREVVEKLKEVKER

SEQ ID NO: 21830 - protein, 55 aa, Artificial Sequence
  Synthetic
EEVDRLRRELREVLKRNRESVERAEEKLKKSVKELDERVKELEEELDRALDELRK

SEQ ID NO: 21831 - protein, 60 aa, Artificial Sequence
  Synthetic
SEVEKLERDVRELHKDNKRHSDELDREVKKLLEELRRALEELKEKVERLTRRLEEVKRRT

SEQ ID NO: 21832 - protein, 55 aa, Artificial Sequence
  Synthetic
KEVEELKRRIDRSVEENEDSIRRLKEEIKRIVDEVRRVVEKLIKEIKDAVKKLRD

SEQ ID NO: 21833 - protein, 59 aa, Artificial Sequence
  Synthetic
DELEELKRRVEELEERNKDHSRKMRETVERVKERLDRHSKEMEKEVRKVVEDIKDVKRK

SEQ ID NO: 21834 - protein, 55 aa, Artificial Sequence
  Synthetic
REVDELKKEIERADKENKDSIEELERELDRVLKENEKSIRELEKELDDVLDEADK

SEQ ID NO: 21835 - protein, 57 aa, Artificial Sequence
  Synthetic
SEAEKLLEENRRELEKVKRDAERLNDEIRERLKEIEDKLKTLNDEIRKLVKEMEDRN

SEQ ID NO: 21836 - protein, 56 aa, Artificial Sequence
  Synthetic
EEILRTIADDNRRVLEEIKKIIKHSRDELERVKRDIDRIVKHSVKLLEDVLRRLRK

SEQ ID NO: 21837 - protein, 60 aa, Artificial Sequence
  Synthetic
DEEEIVKRIEDDARRIIEEVKEVLRRIRDLNERILREAEEVLKEIREINRKVLEDLRRDG

SEQ ID NO: 21838 - protein, 55 aa, Artificial Sequence
  Synthetic
ERVLKRLRDELDKLREDLERILRRNKKLLDELRELLERSRRENEKLVEELKRKAK

SEQ ID NO: 21839 - protein, 59 aa, Artificial Sequence
  Synthetic
SEAERIEEEVKKLLKDVKKKLEELKESSKRVVEELDKVLKELKESSDRLAKEIKKALDD

SEQ ID NO: 21840 - protein, 56 aa, Artificial Sequence
  Synthetic
KDVLEKLRELVKRLIDDLRRVVEELEETNERLDRKLEDVLKKLRETNEKTLRELRK

SEQ ID NO: 21841 - protein, 59 aa, Artificial Sequence
  Synthetic
SVREDLKRVVEDIRRIVKEVHERNREASKRSEDLVREVHERNERIARELKKIVDDLRRV

SEQ ID NO: 21842 - protein, 56 aa, Artificial Sequence
  Synthetic
RRVLEEVRKEVEKVLREIEKSLRDHERENKRLLEDIERSLRELEKTVEKLKRDIRR

SEQ ID NO: 21843 - protein, 59 aa, Artificial Sequence
  Synthetic
SAREALKEAVKEIERIVREVHDRNRRASERSEKIVRDVHRRNKKLTDESKDLVDKARRI

SEQ ID NO: 21844 - protein, 56 aa, Artificial Sequence
  Synthetic
KRVLEEVAKRVEEVLKRIKDSLEEHRRVNDKLLKDIEKSLRDHERANEKLLEDLRK

SEQ ID NO: 21845 - protein, 57 aa, Artificial Sequence
  Synthetic
DELEELLKRIEDVIRRVEELLDELLERHRKVSKESNERLEELLRRHEKVSEEVKREN

SEQ ID NO: 21846 - protein, 59 aa, Artificial Sequence
  Synthetic
EEVEKRVREVLKEIEDRAREVEKRARDSVRRNREELERLERDVRRSLKKLRDDLERMRR

SEQ ID NO: 21847 - protein, 61 aa, Artificial Sequence
  Synthetic
SKVEKLLEDIKKLVKEVSDKIEELLKRLHEVVREIAKAVRDLIRENKRVVDDIVKKVRERG

SEQ ID NO: 21848 - protein, 59 aa, Artificial Sequence
  Synthetic
KEAEDDARRIIEEIERLLREVKKYIEEHIKRLRTVLKKLAEDSKKHLDELRELLRRLEK

SEQ ID NO: 21849 - protein, 61 aa, Artificial Sequence
  Synthetic
SELETLLTDVERLLDESRRVAERVLKEVKELLDEWEKRHKELADRIRELLRRVEEEMKRAN

SEQ ID NO: 21850 - protein, 60 aa, Artificial Sequence
  Synthetic
DEEVRREATDLRREIKEHTDEVEKKLEELAREIEELLERSERSAEELRKEIEKLLEEIRR

SEQ ID NO: 21851 - protein, 60 aa, Artificial Sequence
  Synthetic
SEIEKLLEDFKKRIEDIKRRLERYLEEVRKRVEKVKRELERALEESKRTVDEVKKEIDRA

SEQ ID NO: 21852 - protein, 55 aa, Artificial Sequence
  Synthetic
DEVRKEIRKLLDDIRRVVEKVKRDNERLNRDLNRRVREVIRESEKLNKRLEEAVR

SEQ ID NO: 21853 - protein, 58 aa, Artificial Sequence
  Synthetic
SESETLEKELKELKEEADKLIEDIRRRLEEVARRVERNVTESERTLEELLRRAREKKK

SEQ ID NO: 21854 - protein, 55 aa, Artificial Sequence
  Synthetic
RRVKEEVKRVLEEIERALRTVLKEVRDLLKRLEELHREVLDKNRRVLKAISDEAK

SEQ ID NO: 21855 - protein, 60 aa, Artificial Sequence
  Synthetic
SEDEKVKKDLDELRDRVRKNIERIRRKLKKLLDEARDNVRRSEETLRRLARRVEKIKKDK

SEQ ID NO: 21856 - protein, 55 aa, Artificial Sequence
  Synthetic
RSVKEELRRVLEDLKRLHEEVSKRVEDALREMKELHDRVLKRNKDVLRELKERAQ

SEQ ID NO: 21857 - protein, 60 aa, Artificial Sequence
  Synthetic
SLEEIVKDILRRIKTKADEIKEKVDRSLREIEELVKEIKKEVDDSLRDIERVAEELRREG

SEQ ID NO: 21858 - protein, 55 aa, Artificial Sequence
  Synthetic
ERLLRDVRRILEELRDLVRRLHEDNKRLDEDLNRKVEKLKRDNEDLNKKMRDRAE

SEQ ID NO: 21859 - protein, 60 aa, Artificial Sequence
  Synthetic
SEKEEADKKLKKVMDDLREILRRLLETLKRVIERSEEVLKRLDDRNREVLEEIKRAIERL

SEQ ID NO: 21860 - protein, 56 aa, Artificial Sequence
  Synthetic
EKEAEETVRRMKELVDRIRKKAEEDVKKLREDSKRTADRSKKNVEDLKRRLDELAK

SEQ ID NO: 21861 - protein, 59 aa, Artificial Sequence
  Synthetic
SEIEELVRRLERKLEEHKKMVDKYREDLKRTLDRVNELSKDYIKKLRDILEKAERLVRR

SEQ ID NO: 21862 - protein, 55 aa, Artificial Sequence
  Synthetic
EDLRRIAERVLREAHRTAKDLHRDSERVREEIKKSVDRVHEESERVLREIRKLKK

SEQ ID NO: 21863 - protein, 60 aa, Artificial Sequence
  Synthetic
SIEEEVRKIVDDIRRSSEELEKSVKRVVEEIAESSKEEKDRVKRNIEEIRKEIDKLRRDG

SEQ ID NO: 21864 - protein, 59 aa, Artificial Sequence
  Synthetic
KDVLEKLKRLLDKVVRDSEDVIRKLEERLKKVVDESKEVLKELEELHERVMREVEETIR

SEQ ID NO: 21865 - protein, 60 aa, Artificial Sequence
  Synthetic
KIEEDIRRELTKILDKLRKLLEKAKKNVEDIERSSRDLKRRVDETIEKIKDELRKLERDG

SEQ ID NO: 21866 - protein, 59 aa, Artificial Sequence
  Synthetic
EEVLERAERELRRVMKEVEKVLREIEELHRRVAETSKRVIDELRRLLEKVFKEFEDAVR

SEQ ID NO: 21867 - protein, 61 aa, Artificial Sequence
  Synthetic
SEVDEDLKRLEDRVREYEDRVREDIRRLEEDLKRLRKRIEDSIEEMRRTLEEVKEDVRREG

SEQ ID NO: 21868 - protein, 59 aa, Artificial Sequence
  Synthetic
RDRLTKLREVLERLEKRIREIDEEIKRVLERVEKEIRDALRKIEKVNEDVEKALRDILR

SEQ ID NO: 21869 - protein, 59 aa, Artificial Sequence
  Synthetic
SLEEEIEKVIRKLKEVVERINERNKRALDKLRKVVEEVKDALRRTNEELKKVVKEVERR

SEQ ID NO: 21870 - protein, 59 aa, Artificial Sequence
  Synthetic
KDDVRRLKREIEELIKRIDDKIRKLIRRHEELVREIREELKKHEERVKDVLRKLEKLAE

SEQ ID NO: 21871 - protein, 57 aa, Artificial Sequence
  Synthetic
SEVEKLKKEADEESERNKDEVRKLEKESKENADRIRRHLEEHLKRSDENVKRVKDAK

SEQ ID NO: 21872 - protein, 55 aa, Artificial Sequence
  Synthetic
EEMLRRLEELLRENKKRNKEVLDRDRELLRELDEEVDDVLRRDKELLEELERRLK

SEQ ID NO: 21873 - protein, 61 aa, Artificial Sequence
  Synthetic
SEVDEVLERIERLADDNRRKAETVLRKIARLLEELKKHSEDVNRKIKELVKELEDEVRRAG

SEQ ID NO: 21874 - protein, 59 aa, Artificial Sequence
  Synthetic
RELLERVLRRVEKKSEDHKRKLEEAERRVDKNREDHERRNEELLRRVEERVEDVKRRIK

SEQ ID NO: 21875 - protein, 60 aa, Artificial Sequence
  Synthetic
DEVKEVLKRIKDLLDELRRHSEKVNRDVERLLEELARNSEKVNREIRRLLDDLRRLVEEK

SEQ ID NO: 21876 - protein, 59 aa, Artificial Sequence
  Synthetic
RDDLERILREVDKKIKDLKRENERMLEEVERNAKEHKDRDREELKRVKEDLDRLRERLR

SEQ ID NO: 21877 - protein, 58 aa, Artificial Sequence
  Synthetic
KDAEELEKEVERESRKNEESIRRIREEVDKLSKDNDRKLKEIEKEVEDLRRRVDERRK

SEQ ID NO: 21878 - protein, 55 aa, Artificial Sequence
  Synthetic
EKLLDKIRKVVKENEERMDKLLEDIERVVRENIKKNKEVLERARRVIERLEEKIK

SEQ ID NO: 21879 - protein, 58 aa, Artificial Sequence
  Synthetic
DEDKKLEKDVRDKSEDNKRRLEEIKKKVEDASRENERKIEEIKRRVEEKAEEVDRARK

SEQ ID NO: 21880 - protein, 55 aa, Artificial Sequence
  Synthetic
EELLKTATELVTRNRTENERVLREAERVVKENLRRMDELLKDIRRVIEELERRIK

SEQ ID NO: 21881 - protein, 56 aa, Artificial Sequence
  Synthetic
EEVERSLKKLEDDIRRIERELEEMVRKSKREIDKLVRDLEEMLKDSRRKLEKLRKD

SEQ ID NO: 21882 - protein, 56 aa, Artificial Sequence
  Synthetic
EEAIRELERLLEELLRKIEEVIKDLRRLNKELDEEIKRVIDEARRLNKELEDDLRR

SEQ ID NO: 21883 - protein, 60 aa, Artificial Sequence
  Synthetic
SKVEKILKDIKRLLDELRKKLKEVKDRLDEINEELRETLKRSLDRNRKINEELKDKLRRR

SEQ ID NO: 21884 - protein, 55 aa, Artificial Sequence
  Synthetic
DEVLKRVEEEIRRLEEELDRTLERSKREVEKIKREIERTNRESERAVKEIDDRER

SEQ ID NO: 21885 - protein, 61 aa, Artificial Sequence
  Synthetic
SKDEEVLKTLRRILEELRDVHRRNLEDNKRITDRLREIHERNLRDNRRITKELEEVARRDG

SEQ ID NO: 21886 - protein, 55 aa, Artificial Sequence
  Synthetic
DEKREEVKKEVDETRERNERKNRRSREDVKRVEDRNRDANRKSRKEAEDVKRRLT

SEQ ID NO: 21887 - protein, 61 aa, Artificial Sequence
  Synthetic
SKVEEVLKRLREILKELEEVHKENKDDVKRILRDLEKTHKDNLDDNRRITEKLKRVVERDG

SEQ ID NO: 21888 - protein, 55 aa, Artificial Sequence
  Synthetic
DEEREKVERRAKEARDRNKRKNERVKEEVKRVKDRNKKKNDESKETVRKIEEDAT

SEQ ID NO: 21889 - protein, 57 aa, Artificial Sequence
  Synthetic
SDSERILKDIEDKLREIKKRSDDNRRRLEKENREVEKRVREILRRIEEENKDVERED

SEQ ID NO: 21890 - protein, 55 aa, Artificial Sequence
  Synthetic
EKVKRDLEEALKTLRKVAEDNKKSLRESLETVKKLLEDLERELRKSAESVRRKMK

SEQ ID NO: 21891 - protein, 57 aa, Artificial Sequence
  Synthetic
SESEELLKRAEDEVRKVEKKSRDNERRLREKLKKAKEDLDRIDEDIKRLNKELEDRN

SEQ ID NO: 21892 - protein, 55 aa, Artificial Sequence
  Synthetic
ERLRRELERILEELRELVRRNEEELKKIMKRVREEVEKLLRKLEKSLESVDRKVT

SEQ ID NO: 21893 - protein, 60 aa, Artificial Sequence
  Synthetic
SRDEKAERMVREVEKKIKELIDRNRRVTEKVKEDIKRLIEDLERVTRDVSRAIKELARRL

SEQ ID NO: 21894 - protein, 55 aa, Artificial Sequence
  Synthetic
EEDDKRIEEDLRKLEEDSRRYDEDLKRELERLRKEVEEYKKRMREELRRLKEEAD

SEQ ID NO: 21895 - protein, 60 aa, Artificial Sequence
  Synthetic
SELERATKVVKRVADRIAELIRENARVTKRVADESRKLLEETETVTREVMRAIEELLKRL

SEQ ID NO: 21896 - protein, 55 aa, Artificial Sequence
  Synthetic
EEDLKKLEDDLKRAADESKKYDDDLRRKLDELRRRHEEYKERLKEMLKRLEDETR

SEQ ID NO: 21897 - protein, 60 aa, Artificial Sequence
  Synthetic
SELEDARRVVKRVADRIKRLIEENERVTKEVKEASEKLLKDTKDATRRLAKEVKELVKRL

SEQ ID NO: 21898 - protein, 55 aa, Artificial Sequence
  Synthetic
EKDKKRLEEELERLRESSERYDERLKRELERLEEEHRRYIRRLKEELDKLREDTD

SEQ ID NO: 21899 - protein, 60 aa, Artificial Sequence
  Synthetic
SEVEELIKDIRRHNTRLEKRMREILEDLKRHLKRSEDKMRKLVKELKELLDRLRDIARDG

SEQ ID NO: 21900 - protein, 59 aa, Artificial Sequence
  Synthetic
EKLLKELEDVIRENEKRSRDIARTLEKALEELRKASKELIDTARDILRKVLEDVDRLRQ

SEQ ID NO: 21901 - protein, 57 aa, Artificial Sequence
  Synthetic
SEVETSAERLKREVEKHHKEVEEYIRRLEEELKKMTRDVERALEKIKEDVDRLRKEQ

SEQ ID NO: 21902 - protein, 59 aa, Artificial Sequence
  Synthetic
EELLKRLRDVLEEVSRRIKDNLEELKKVSERLKRRIEELIRRLEKVMRDVRRSAEEIKR

SEQ ID NO: 21903 - protein, 57 aa, Artificial Sequence
  Synthetic
KEVEEDIERLKRILEKHHKDIERAIRRLEEKLKRLEDKLRKYKRDLEEEVARLKDEQ

SEQ ID NO: 21904 - protein, 59 aa, Artificial Sequence
  Synthetic
EKVLRRLKEVLREIEERIRRNKEELDKALERVKRTIERLIRELEKLSERLKRIADEIAR

SEQ ID NO: 21905 - protein, 57 aa, Artificial Sequence
  Synthetic
DEVDEIVRRLRETVDRHHKRIKEAIEKLKEEVKKHHREIEEYIRRLEEEVKRLADEQ

SEQ ID NO: 21906 - protein, 59 aa, Artificial Sequence
  Synthetic
RKLLEKLDRVLKKLEEDIRRNKEALDRALREAEKSLTDNIKELRDVSREIAERIKEITR

SEQ ID NO: 21907 - protein, 60 aa, Artificial Sequence
  Synthetic
DEKEKVIEDIKELLKELEKKLEDIIREIEKELKRNDEENEESRRRIEDMLRRLEELKRRS

SEQ ID NO: 21908 - protein, 55 aa, Artificial Sequence
  Synthetic
EDVDRVLREAERRVREILKELEEVLRRAEERSEENLRSAEKVLREVEKRLKELTD

SEQ ID NO: 21909 - protein, 60 aa, Artificial Sequence
  Synthetic
SEEERIIKRIKETLEDLKRKLDRIREEIERDIRRNNKKNEDSIRDIERMLRELRRLFEES

SEQ ID NO: 21910 - protein, 55 aa, Artificial Sequence
  Synthetic
KELKEVLEEAKKTVDKILRDLEELLRRAEEESRRNLREAEEVLKKVREDLERLAT

SEQ ID NO: 21911 - protein, 60 aa, Artificial Sequence
  Synthetic
SEEEEVIKEIKDALRDLRRRAEELMKELRELIRENNERNKESEREIRRLLDRLRDLKRRS

SEQ ID NO: 21912 - protein, 55 aa, Artificial Sequence
  Synthetic
EEVKRVLDDAKRAVEEILARIKELLDEVRKASKENLERAEELLRDVERELDRLTK

SEQ ID NO: 21913 - protein, 56 aa, Artificial Sequence
  Synthetic
SEVERLIEDIRRANEELNRKSERKSRESKKENDRLNRESDKKSRDSERVLEELRRR

SEQ ID NO: 21914 - protein, 59 aa, Artificial Sequence
  Synthetic
EELVRRLDELLKESETNVRDNKRRVRDNLRRTEENARRNLEKVKKNVRKIDKVIKEIET

SEQ ID NO: 21915 - protein, 56 aa, Artificial Sequence
  Synthetic
SEVDETARKLDEDLKRLEEEVRRTSKESEDENRKLNETSKRESDESKRRLDELRRK

SEQ ID NO: 21916 - protein, 59 aa, Artificial Sequence
  Synthetic
ERVLRKLKDLVEKVKRVIEKLVKELEDNVKKTKDNARRNKREIEENARRIREEIKKLED

SEQ ID NO: 21917 - protein, 56 aa, Artificial Sequence
  Synthetic
SEVEKEADEVRRTNEELNRRSEETSRRSEEDLRRLEEKVRRASKKSEDDLRRLKRE

SEQ ID NO: 21918 - protein, 59 aa, Artificial Sequence
  Synthetic
EEMVKRLRDVVKRSRENIEENKRRIEDNLRRIDEVIRRLIEELRRNMRRIEEEIERIRR

SEQ ID NO: 21919 - protein, 59 aa, Artificial Sequence
  Synthetic
SEVEREIERLEEDLDRLRREVDEAHKRSKKKLEELRKEVEDYEERVKEELRRLEKLVRE

SEQ ID NO: 21920 - protein, 59 aa, Artificial Sequence
  Synthetic
EEVRERLERALRKAEKDVKRLEDELKRSLKEVRETVRELEERLREVNERVEELLDRLRK

SEQ ID NO: 21921 - protein, 62 aa, Artificial Sequence
  Synthetic
RVEDRVRDLIRKHDETSREIEKRIRDSIKRLADVLDKIRKAIDDLIRKLREAVEDLLRKIGK

SEQ ID NO: 21922 - protein, 59 aa, Artificial Sequence
  Synthetic
EKEVEDLARKIEKLNEDLRRRLEKLDKENKDVIRRLEDALRRLAEEIKRLIDELRERAR

SEQ ID NO: 21923 - protein, 56 aa, Artificial Sequence
  Synthetic
KDEDRLRDDIRRAIEEIEEKLKRLKDRNKEHIERLKKRNEDLNRRNRDVVRRLRER

SEQ ID NO: 21924 - protein, 55 aa, Artificial Sequence
  Synthetic
EELEKLREDLRRVIERVEREIRRSSEENRRVVKKSVDNIRDSLRKNEDVIRKLRK

SEQ ID NO: 21925 - protein, 59 aa, Artificial Sequence
  Synthetic
DVEKKIKDLARELREVIDDARRKNRKLHEDAREVSERHEKAVRDLTEELKRVIDELRKR

SEQ ID NO: 21926 - protein, 59 aa, Artificial Sequence
  Synthetic
EDMLREVEKRVKEEIKRIKDDLDEVRKRHEKKVRDIRKHLKELEDRIKKTEKDLREEAR

SEQ ID NO: 21927 - protein, 59 aa, Artificial Sequence
  Synthetic
RVEEEIERLSRDLKRVIEKAKRDNDRLHKEVRKASEDHKRENKRLHEDVKRVIEELRKR

SEQ ID NO: 21928 - protein, 59 aa, Artificial Sequence
  Synthetic
ERMLKKLEDEIEETKKDIEREIREIDKRHKDAVKELRDHIRELAREHEEEKKRLEETAR

SEQ ID NO: 21929 - protein, 59 aa, Artificial Sequence
  Synthetic
RVEEEIRRLLEESERVHKELEDINRRLHEKVDRVSKKHREENKRLHEKLKRAIDRLREK

SEQ ID NO: 21930 - protein, 59 aa, Artificial Sequence
  Synthetic
EEALKKLEKEVKDNERKLREEARRVEEEHEKTVRDLKKHLDELREEHDRILEELERTRK

SEQ ID NO: 21931 - protein, 60 aa, Artificial Sequence
  Synthetic
SDMEKRKRDIKRKLDESNKKSEEAVREVERKLDESNKEVKKKEERVEDELRKLEEKRRRG

SEQ ID NO: 21932 - protein, 55 aa, Artificial Sequence
  Synthetic
EKLKDIERELRENLKRNEDIVREILKKLEDNLRRVEKLAEDIRRKLEKVADDLRK

SEQ ID NO: 21933 - protein, 56 aa, Artificial Sequence
  Synthetic
SELEEDKKRIEETLRRLEETAKEYHRRSREELRRLEEEAKRYHEESKETLDRLRRE

SEQ ID NO: 21934 - protein, 55 aa, Artificial Sequence
  Synthetic
KKLKDIKEEVERVMKKLEDLVRRDNEESEKVLEKLKRLVERNNEDIKRALEELRK

SEQ ID NO: 21935 - protein, 56 aa, Artificial Sequence
  Synthetic
SEDEERLRRIEEELRRLEEEAREYHERSREELKKLREKAKEYHERSRRELEELRRR

SEQ ID NO: 21936 - protein, 55 aa, Artificial Sequence
  Synthetic
KRLKEITRKVEEVMKKLEKLVRDNNEEIRKVMEELKKLVEDDNEESDRALKELET

SEQ ID NO: 21937 - protein, 56 aa, Artificial Sequence
  Synthetic
DEMETRLEDVRKKLDDSRRETRKVEEDIRRTLEELRREAKKYHEDSKEELDDLRRR

SEQ ID NO: 21938 - protein, 55 aa, Artificial Sequence
  Synthetic
EKLKEIKERIEKVLRENRDVVKKIKEDVRRALKELEELVRKNNEDIKRLLDELRR

SEQ ID NO: 21939 - protein, 56 aa, Artificial Sequence
  Synthetic
SRVEEVERRVRDKSRKSKEKLRKLEEDVRRESETSRDRLRKLAEEVKTKVKELKDK

SEQ ID NO: 21940 - protein, 56 aa, Artificial Sequence
  Synthetic
SEDLKRLAKEIEDNLEELERKIREIRKELRRSLEEVEKTVEDLKRELKKVLDELRK

SEQ ID NO: 21941 - protein, 60 aa, Artificial Sequence
  Synthetic
SDIEEAKERLERKLEKLLRKVEEYLKEIADEIRRLEEELEEYNRRSKERIDRVLEVKERG

SEQ ID NO: 21942 - protein, 56 aa, Artificial Sequence
  Synthetic
ESVLKELEELLKELEDRIRKILTESTELLRRLEKRVRDSLRRNTEELDELLDRLEK

SEQ ID NO: 21943 - protein, 59 aa, Artificial Sequence
  Synthetic
SEVEKSEKKLRDEIERLVRENEKYLERIKELVEELLRELEKAVRELEKEVTEIEEVKRQ

SEQ ID NO: 21944 - protein, 56 aa, Artificial Sequence
  Synthetic
ERVLKKLRDLVKEVVDRSKRSLDESTKVLDTLEKEVRKVLEALKDILREALERLDK

SEQ ID NO: 21945 - protein, 60 aa, Artificial Sequence
  Synthetic
SREEIIKKLKEEVERLLRESAKVLEELKRRLEALLRESEEILRELRELVRTLLEKLERDG

SEQ ID NO: 21946 - protein, 59 aa, Artificial Sequence
  Synthetic
EKDLKKTEDDLKREADEHRKAVEDELRKVKKRLEEHRERVRKRLEDIEKTLRDIDREVR

SEQ ID NO: 21947 - protein, 60 aa, Artificial Sequence
  Synthetic
SSVEDLLRKAEEVVRRAEEKSRDSHEKTKDVLRKVKRKSEELNKHNRESIKKVEEVRRRT

SEQ ID NO: 21948 - protein, 55 aa, Artificial Sequence
  Synthetic
EEVLKTIEDLLRKLERKVRETIETDRRLLRKVEEELKRSIEDSRRLVDELKKRVT

SEQ ID NO: 21949 - protein, 60 aa, Artificial Sequence
  Synthetic
SSKDRLRDEIRRVVERVREISERVNKHNRDSVKRVEEESRRINKEIRKVVEDVDRMRRRV

SEQ ID NO: 21950 - protein, 55 aa, Artificial Sequence
  Synthetic
EEVLREIEKLVRDVEREVRESIERSKRLVKELEERVKKSIDEIKKEVDDVERKLK

SEQ ID NO: 21951 - protein, 60 aa, Artificial Sequence
  Synthetic
KEVEDLKEKVKRVVEEVEKISRELNKHNRDSVRRAEKTSKELNDHNKDSIRKVREVLKRT

SEQ ID NO: 21952 - protein, 55 aa, Artificial Sequence
  Synthetic
DKVLKDIKKLLKDVEKKVRESIKESKELVKRLKDKLEESIRRSKKDVEDLKREVD

SEQ ID NO: 21953 - protein, 60 aa, Artificial Sequence
  Synthetic
SSVDKLRKEIREVLRRVERISEESHKHNEESVRKVKERSERLNKHNRDSARDVERVLREV

SEQ ID NO: 21954 - protein, 55 aa, Artificial Sequence
  Synthetic
EEVLEEIRRRLEEVEERVRRDLEESKKLVDELRKRVEKSIRESRKLVDDLRKRVT

SEQ ID NO: 21955 - protein, 60 aa, Artificial Sequence
  Synthetic
SSVDKLKDEVRKVVETVKDLSRRLNETAKRVADRVRKISRETHEEVRKVVEDVKDVRRRT

SEQ ID NO: 21956 - protein, 55 aa, Artificial Sequence
  Synthetic
ETVLEELKRLLDKVREDVRRSIEEIRELLKTVEKEVRDDSRDLERLLKRVEEETK

SEQ ID NO: 21957 - protein, 60 aa, Artificial Sequence
  Synthetic
SSVDRVREEIERVARRVRKLSEDSHREVEKVLKEVEEISKRTHEEIDKVVKEVEKVIRDT

SEQ ID NO: 21958 - protein, 55 aa, Artificial Sequence
  Synthetic
EEVLEEIRRLLETVEREVKTDIDRLREELRRVEEAVKKDSEDIRRKLKRVEDDVK

SEQ ID NO: 21959 - protein, 58 aa, Artificial Sequence
  Synthetic
REAEDIVRRSHELVERAREKLRRLNKDSERLVDEVEKELREVVERVAELIKRAKDEIG

SEQ ID NO: 21960 - protein, 59 aa, Artificial Sequence
  Synthetic
EEVLEKVLRDSERVLKELEEKLRKSLEDVKRVIDEVKKVLEDVKRKVEEVLKRVRDKRR

SEQ ID NO: 21961 - protein, 58 aa, Artificial Sequence
  Synthetic
SRAEKVERESHELVRTLKEELDRVVEKVERLVRRVEEELKRVNKESAELVKELKDRIG

SEQ ID NO: 21962 - protein, 59 aa, Artificial Sequence
  Synthetic
DEVLTKLVKSSRDVIEEIREDLKRVLKEAEEVIRRVKKRLEDSLEKVKEVLRELLRAAK

SEQ ID NO: 21963 - protein, 58 aa, Artificial Sequence
  Synthetic
SSAEDVVRRSHELVRRLEEELDKVNEDSERLVREVEERLKRANEESKRRVEDAKRRIG

SEQ ID NO: 21964 - protein, 59 aa, Artificial Sequence
  Synthetic
EEVLEEVLRRSREVLKKLKEDLKRSLDDAERVIRRVREDLKRSLKRVREVLEEVRRRTK

SEQ ID NO: 21965 - protein, 58 aa, Artificial Sequence
  Synthetic
SSVDRIVEESHTRVRKLMKDLEDVNDESRRRVERLRERLEEVVKEVEKLVEELRRRIG

SEQ ID NO: 21966 - protein, 59 aa, Artificial Sequence
  Synthetic
EEVLKTILERSREVLDRIRKELERSLKEVEDVLRRIEKDLKKVLDEAREIIKRLLDEAK

SEQ ID NO: 21967 - protein, 60 aa, Artificial Sequence
  Synthetic
SRLETVLERAKELIDRIRKLLEDVRRKVKELIDRIRRLNEEANRESEELIRRIEEELRKG

SEQ ID NO: 21968 - protein, 57 aa, Artificial Sequence
  Synthetic
DARRILEEVRKLVKELEEELRRALKEVRDLAKEVDEDSKRALDRNEKLIRDLDRKVE

SEQ ID NO: 21969 - protein, 60 aa, Artificial Sequence
  Synthetic
RELEEAKKKVEDLLRRILEENERAHEESKKLIEEIRRLLKKMNEESEELRERIRKKLEEN

SEQ ID NO: 21970 - protein, 57 aa, Artificial Sequence
  Synthetic
DVERALDDVRRLLREVERRSEELLRTDEEAIRTLKKEIDKVLKENKDKADRLKEEVN

SEQ ID NO: 21971 - protein, 60 aa, Artificial Sequence
  Synthetic
DELETVERRVEKLIEDIKRELRKVHEESKKLIREIKKELEDANRESERVIEEIKRELDRD

SEQ ID NO: 21972 - protein, 57 aa, Artificial Sequence
  Synthetic
DARKMLEDVKKRAKDVEDEIEEVLRRDRELIKELKRELDEALRENRRLIEDLKRKIK

SEQ ID NO: 21973 - protein, 60 aa, Artificial Sequence
  Synthetic
SEAEEALKRVKKAIDDARKLLEEANRKDKKSIEEAEKLLREAHERSKKAIKEAEDALDKA

SEQ ID NO: 21974 - protein, 57 aa, Artificial Sequence
  Synthetic
DAEKALRDAKRLADDLKRTADEVLKENKRTAEDLKRKADEVLERDKKLAKELKEKAT

SEQ ID NO: 21975 - protein, 60 aa, Artificial Sequence
  Synthetic
SELEDVKRKVKRLIEDIERALTEANKEDEKSIEETERLNRTVHEESKELVERLKDELRKR

SEQ ID NO: 21976 - protein, 57 aa, Artificial Sequence
  Synthetic
DVDEALKEVRDRAKKLKDKIKKVLDDNRRTVEDNERKSDELLKTDKELVREVKERTE

SEQ ID NO: 21977 - protein, 61 aa, Artificial Sequence
  Synthetic
RELEKVRKEVERLIKEIKDLNKRAHDETKTRIDRIREKNEKVHEESKRLIREIEELLRRKG

SEQ ID NO: 21978 - protein, 55 aa, Artificial Sequence
  Synthetic
EEVIKEVEKRLDELRKESKKLLDDDRRLIEKLKEESRRLLEEDRRLIKELKEKVK

SEQ ID NO: 21979 - protein, 61 aa, Artificial Sequence
  Synthetic
SAAERAAEEVKKLIDEARKLLERAHRETKKLIDEARKLNKRALDEVRRLIEEADRLLRRDG

SEQ ID NO: 21980 - protein, 55 aa, Artificial Sequence
  Synthetic
EEVAERARRLAEELKKEADDVLRKDRDLARRAREESEEALKEAEKLARDLRRRAK

SEQ ID NO: 21981 - protein, 60 aa, Artificial Sequence
  Synthetic
KEAEDIKRKVEKVAREITEKSRKSHEELRKVVKEARDKSEKSLRDVERVLREIEELLRRR

SEQ ID NO: 21982 - protein, 55 aa, Artificial Sequence
  Synthetic
KDLIEEIKRRLDEVRRRSEDNLKKMEEELKKVEEDSRRVVERIRTELKRVEDEAR

SEQ ID NO: 21983 - protein, 60 aa, Artificial Sequence
  Synthetic
SEAEKIRKDVEKVIREVREDSKRTLERSRKVDEEIRRKSETSHRLVEEVIRRAEELLRRE

SEQ ID NO: 21984 - protein, 55 aa, Artificial Sequence
  Synthetic
EELIEEIKKALEDVKRESEKVKEESRKSLEDVERDSDRNLKDMERLLREVTERAK

SEQ ID NO: 21985 - protein, 60 aa, Artificial Sequence
  Synthetic
DEVEEIRKEVERVIREVEEKSKETLRRSEKVDREAKKKSDDSRRKVEKVADEIRRLLETR

SEQ ID NO: 21986 - protein, 55 aa, Artificial Sequence
  Synthetic
KDVIEEIRRLLDEVRRRSEKVIRDSERSAEEVKERSERVIEELKRLLEKVAREVK

SEQ ID NO: 21987 - protein, 60 aa, Artificial Sequence
  Synthetic
SSVERVERDVARVAREIRKISRDTKEESKEVDRRIDEISKRTNEDVRRVAEEIKRLKEKR

SEQ ID NO: 21988 - protein, 55 aa, Artificial Sequence
  Synthetic
KDVIKEIEDRLREVEEESKKAIEESKTSLKRVKEKSEKNVEDMKKLLEKVREDVR

SEQ ID NO: 21989 - protein, 60 aa, Artificial Sequence
  Synthetic
SEVEKVLDEIRRLLKEVEERSKENNDRNEELARRNTRRSEENIRRIEELLRRVREEARKD

SEQ ID NO: 21990 - protein, 59 aa, Artificial Sequence
  Synthetic
EKFLREVRREIEEIIRRIKEASEKTHKEAKEVVDRINELSRKSHETIKEIIKRVRDRAK

SEQ ID NO: 21991 - protein, 60 aa, Artificial Sequence
  Synthetic
REVDEVLDEIRRLLERVREESEKNNRDNEKLMRDNEDRSRKVIETIKRLLEDVKDRATKK

SEQ ID NO: 21992 - protein, 59 aa, Artificial Sequence
  Synthetic
EKFLREVRREIEEIIRRIRELSERTHREAKEIVDRINELSKRTLDKAKEMLDRAEEKAK

SEQ ID NO: 21993 - protein, 60 aa, Artificial Sequence
  Synthetic
DEVEKVLRDIEKKLEDVERRSKEVIDEIRKLLKEVEEESRRNVKKIREELKKVVDDVRRK

SEQ ID NO: 21994 - protein, 59 aa, Artificial Sequence
  Synthetic
EKFLRDVKRMVDEILDTARELSRRTLEEIKRIIARIRERSEKSHEEARKALRDVEEKAR

SEQ ID NO: 21995 - protein, 60 aa, Artificial Sequence
  Synthetic
DSVREVLKKIEDELERVKRDNKDVNRKNEELMRRNEERSRRVVEDIKRKLKELVDDVRRN

SEQ ID NO: 21996 - protein, 59 aa, Artificial Sequence
  Synthetic
EEVLKRVDEEAEKVLRENEKLSKKSLDEAREIVREINRLSEDTRREADEILERVKEKVR

SEQ ID NO: 21997 - protein, 60 aa, Artificial Sequence
  Synthetic
DEVETVLEKIERLLRKLEKDSREVIKKIKRLLDEAKKESRKNIEEIKKLLEEVKREVDRR

SEQ ID NO: 21998 - protein, 59 aa, Artificial Sequence
  Synthetic
ERFLREVEKELEDMLRRVRKLSEDTERKIREILERIKRLSDDSNRKAKEILREIRKRAE

SEQ ID NO: 21999 - protein, 55 aa, Artificial Sequence
  Synthetic
DELEKVKEEIRRLLRRIEEDVKRSEERNKELLRRITEEVKRSERRNEELLKEIKD

SEQ ID NO: 22000 - protein, 56 aa, Artificial Sequence
  Synthetic
LKKVREDLERMLRRVEEELKRSNEESERAIEEVRRELEDIDRESRKAIEDVLREEK

SEQ ID NO: 22001 - protein, 59 aa, Artificial Sequence
  Synthetic
SEIDEVLTRLRKISKDLNETSDRVNERARKIIDDIKKESKRVNDEAREIVERLKREIDK

SEQ ID NO: 22002 - protein, 59 aa, Artificial Sequence
  Synthetic
KDKVERVVREVEKLHEEDRKRLEESTRSVRKLLEELKRELEKSTRSVKKLVDELRERVR

SEQ ID NO: 22003 - protein, 59 aa, Artificial Sequence
  Synthetic
DEVDEMLKRAEDRIREISDTSRKVNEDARKIVEDLKRDSERVLRELRKRIEELRREIER

SEQ ID NO: 22004 - protein, 59 aa, Artificial Sequence
  Synthetic
EKRVREVAEEVKRLVKELEERLRRSTESVKRLLEDVERAVKESSDEVEKLLRRLREELE

SEQ ID NO: 22005 - protein, 59 aa, Artificial Sequence
  Synthetic
DEIEEVLRDAKRISDELNRRSEEVNRELREIIKELTKRSRKVLEELKKIVRDLEKKIKD

SEQ ID NO: 22006 - protein, 59 aa, Artificial Sequence
  Synthetic
REKAERVLRTVEELHKEDRDRMKESTDSVKRLLEELKRRAEKSSRTVEELLRRLEEKIR

SEQ ID NO: 22007 - protein, 59 aa, Artificial Sequence
  Synthetic
SEIDELLERAKKRSKELNDTSKEVLDRARRIIEEISKTSEEVNKDLERIIRELAEEIKR

SEQ ID NO: 22008 - protein, 59 aa, Artificial Sequence
  Synthetic
EKRVREVLKEVRRLHEEDRKRMKESSEDVERLLTELRKRMKESTDSVEKLLKELEDRVR

SEQ ID NO: 22009 - protein, 59 aa, Artificial Sequence
  Synthetic
SSLEKLLEDVRRRSEELNRRSRKVLEDLKDIIRRLKEESKRVLDEAKKKVDDVERKIDK

SEQ ID NO: 22010 - protein, 57 aa, Artificial Sequence
  Synthetic
KVRKALEDVRRLHEEDKRRVDESSKEVERLLRELREDMKRSSEEVERLVKRVRDRLK

SEQ ID NO: 22011 - protein, 59 aa, Artificial Sequence
  Synthetic
SEADELLKEVKRISDELNDTSRRVLEELREISRRLNEDSKRVLKELEDILEEIRERIDR

SEQ ID NO: 22012 - protein, 59 aa, Artificial Sequence
  Synthetic
EERVRELVERVKELHEEDKRRMDDSSRDVERLHKEDADSARDSSRKVRELLEELRRRVE

SEQ ID NO: 22013 - protein, 60 aa, Artificial Sequence
  Synthetic
KELEDVLRELKRILEELEKLSREADERSKEIVKRLVEETTRSLKEVKEIVERLKELDDAG

SEQ ID NO: 22014 - protein, 59 aa, Artificial Sequence
  Synthetic
EKRAREVRETVRKLVEDVKKKNEESERRNRELVKEVRKRNKEVRDRSRKLVKELEDKLR

SEQ ID NO: 22015 - protein, 60 aa, Artificial Sequence
  Synthetic
SSLEKVLKDLRKILEDLRREIKTVLDDLRRILEELKRETERVDKKSKEIIETLSELRKAG

SEQ ID NO: 22016 - protein, 59 aa, Artificial Sequence
  Synthetic
KKKVDEAIREVEKLIEELRRDLDRVRKTVEKLVRDLERRNEESKRRNEKLVRKLEEELR

SEQ ID NO: 22017 - protein, 59 aa, Artificial Sequence
  Synthetic
DELETVLRKLEKLVRDLKKRSTDVLRRLEEIVKELTDETKRVDDESRDILRRLKELRDR

SEQ ID NO: 22018 - protein, 59 aa, Artificial Sequence
  Synthetic
KEEADRVITTVEELVKELRRRNEEVKERVEKLARELRRRNEESIKTNEKEVRELEKRLK

SEQ ID NO: 22019 - protein, 60 aa, Artificial Sequence
  Synthetic
STLKKVLDENRKSIKELLDMSRRVLEKLREILRRLEEETREVDEKSERIVTTLEELIKAG

SEQ ID NO: 22020 - protein, 59 aa, Artificial Sequence
  Synthetic
EDKAKKVIDEVRKSVKRLEEENERVLRDVERLVREVEKKNRESEKRNRKLVEELRRKLK

SEQ ID NO: 22021 - protein, 60 aa, Artificial Sequence
  Synthetic
SVLEEVLKKLEKILRELKREIEEVLKKLRRILEELVRETEKSLEKVDRIIKELEKLIEAG

SEQ ID NO: 22022 - protein, 59 aa, Artificial Sequence
  Synthetic
EKKAREVTKTVEKLIRELRKTLEDVKREVRKLVEEVKRRNKDVERKSRELVKKLEERLR

SEQ ID NO: 22023 - protein, 60 aa, Artificial Sequence
  Synthetic
STLEEVLERNKESIERLRKESEDSHRKLKEIMERLKRETERSLEEVEEIVKRLKELTDEG

SEQ ID NO: 22024 - protein, 57 aa, Artificial Sequence
  Synthetic
KVKRVIEKAKKSVEDLERRLREDEEAAREWVKKLRTENEKVRKRSEELVRELEERLR

SEQ ID NO: 22025 - protein, 59 aa, Artificial Sequence
  Synthetic
STLEKVLRDLRKILEELLRMSKKVLEELKRLADRLKEEIKKSLDKVKKIIDELRDLTRK

SEQ ID NO: 22026 - protein, 59 aa, Artificial Sequence
  Synthetic
EDKARKVIEEVTREVRRVEEENKKVERTVEKLVEELEETVREARERSERLVRTLEEELR

SEQ ID NO: 22027 - protein, 60 aa, Artificial Sequence
  Synthetic
SDAERVEKEIREVLKRVEDLLRRVNEETKKVAKEVRELLKEVDDRSREIMKRVAEKLRRI

SEQ ID NO: 22028 - protein, 55 aa, Artificial Sequence
  Synthetic
KDVAREVEKLLRELEKKLEEVNRHDKKLLEELEERLKESEERNRRLLEELKRRLD

SEQ ID NO: 22029 - protein, 60 aa, Artificial Sequence
  Synthetic
REVEEVLKRIEELIRRSEEETREVNERTKKLAEDVRRLLEEVDRRSKKIADEVRELLERI

SEQ ID NO: 22030 - protein, 55 aa, Artificial Sequence
  Synthetic
KDLVRTVEELLKRNEEDLRRVNEHDKKLLEDLTRSLERSEERNKTILEKLKEDLR

SEQ ID NO: 22031 - protein, 60 aa, Artificial Sequence
  Synthetic
SDAEKVLDEIRKRIEESEKRTKEVNDRTREVLDRVRKLLEKVNKESRKVAEDVREAAERI

SEQ ID NO: 22032 - protein, 55 aa, Artificial Sequence
  Synthetic
EEVRKDVERLLRENERSLREVNRHDEALLRELEKRLEEVNRHDDKLVKDLRERER

SEQ ID NO: 22033 - protein, 60 aa, Artificial Sequence
  Synthetic
DEVREILEDVKRINKEVEDELRKIEEEIREIVKTVRDESRKTLEELERILRKVEDDLRKD

SEQ ID NO: 22034 - protein, 55 aa, Artificial Sequence
  Synthetic
EEAVKDNERLAKETEDKVREVVKRIRKIIEEVERTARESERRLRKLLKEVEDRAR

SEQ ID NO: 22035 - protein, 60 aa, Artificial Sequence
  Synthetic
EEIERILEELRRIAKKVEEDSRRTLETVRRLNEEVKRRLREILEEIRRVAEDVRRKLDEK

SEQ ID NO: 22036 - protein, 55 aa, Artificial Sequence
  Synthetic
EDVKRELERILEEVRKKSREALEKNKRLLEDTRRVVEEVKRELEKILRDVKRKVD

SEQ ID NO: 22037 - protein, 59 aa, Artificial Sequence
  Synthetic
SVVEELRDELRRAEEENRKIVEDTTRRLEDMIRRDEKINEEVERRLEEVTRRVEELRKQ

SEQ ID NO: 22038 - protein, 59 aa, Artificial Sequence
  Synthetic
ERKAREMEKEVTEILRRLEEENKRDLDRIKKLLDELRKKNEDTLRRIRRLLEEVRERLR

SEQ ID NO: 22039 - protein, 57 aa, Artificial Sequence
  Synthetic
SSLDEVLERLRKLLKEIEDKVRRINEEVKKSSEDVERELKRVVDELKRRVERLKEEV

SEQ ID NO: 22040 - protein, 59 aa, Artificial Sequence
  Synthetic
ERELEKILRDAERVVREIEKRHRDLLEELKKANEDTRRALDEIRKEAERVLERVREEAK

SEQ ID NO: 22041 - protein, 57 aa, Artificial Sequence
  Synthetic
DEVEEVLKRLRESSEESKRRADDVTRRAEESSRRVHKRSREVVERLKKLVEEVERRV

SEQ ID NO: 22042 - protein, 59 aa, Artificial Sequence
  Synthetic
RRELEKLEREMRDVDRRTDEALERLLRTLEEVNKRTDEENKKILEDLKRVVEEVEERDR

SEQ ID NO: 22043 - protein, 57 aa, Artificial Sequence
  Synthetic
SEIEKVIEELRRSSEESHKRSRKVEEDARRSSDEVHRRSREMLRKLREEVKDVERKV

SEQ ID NO: 22044 - protein, 59 aa, Artificial Sequence
  Synthetic
RRDLRRLREEMRRVDERTTRENEKILRELEEVNKETIKENERLLRDLKRVVDRVREEDR

SEQ ID NO: 22045 - protein, 57 aa, Artificial Sequence
  Synthetic
RRIEEVIKEARKSSRESHEESKEVMERLKRSSDDSHRKSEEVLRRLRKLVEDVERRV

SEQ ID NO: 22046 - protein, 59 aa, Artificial Sequence
  Synthetic
DRELKKLRDELKRVDDETRKANEEILREMEEVDKRSKEANDRLLEELAKVVKRVDDEDR

SEQ ID NO: 22047 - protein, 57 aa, Artificial Sequence
  Synthetic
KDIEEVIRRLRESSKESTKRLRDVVEDLKRSSKEVHDESEDVLRRLEELVRRLKKKV

SEQ ID NO: 22048 - protein, 59 aa, Artificial Sequence
  Synthetic
KRLLKELEDRMRRVDERTDEELEKIRKRMKEVDDRSRDVNRKLAEDLKRAIKRVDDEEK

SEQ ID NO: 22049 - protein, 61 aa, Artificial Sequence
  Synthetic
DEVREVLRRDEELHRELKERIDRILEELERLHRDLKRKIDRVLEELKRLHEDVKRELDKRG

SEQ ID NO: 22050 - protein, 59 aa, Artificial Sequence
  Synthetic
EEALRKLHEESKKSVRDVEKELEELRRENKKVIEDLEDELRRLLEENKRAADELRKRAE

SEQ ID NO: 22051 - protein, 61 aa, Artificial Sequence
  Synthetic
DEVEKVKDDVRKLVEKVKRDAKRAHEDNERKHRKLKKELDDALRELKKRHEELKRRIDDRG

SEQ ID NO: 22052 - protein, 59 aa, Artificial Sequence
  Synthetic
DEALRRLKEELDKMIEDVRKELRKLNEDSDDSIRRVKKRLKELRDENEKVIRDIRRETE

SEQ ID NO: 22053 - protein, 60 aa, Artificial Sequence
  Synthetic
SELEKVRKKVEDISRESEKHLREVKKENDRIIKEIEDELRKLLTDVEREIREVEKRIREE

SEQ ID NO: 22054 - protein, 58 aa, Artificial Sequence
  Synthetic
EKAKRVFEEIERIVRRNKEELRRILKELRELHEEVKEKIKKVLEDVKRLVDELLERAK

SEQ ID NO: 22055 - protein, 60 aa, Artificial Sequence
  Synthetic
SELEKVLRDVREAIKRNEDLLRRVHEESRRISEESEKNLRRVHERSRRIAEDVRRVLRER

SEQ ID NO: 22056 - protein, 58 aa, Artificial Sequence
  Synthetic
EEAEKVAREAKKLVDDLKRKNDEVLDEDRKEVERNERELERVLREDKKLLEDLEREIK

SEQ ID NO: 22057 - protein, 60 aa, Artificial Sequence
  Synthetic
DFAKKLEDEARRVSEESRRHLEDLLRRSKESIDALKRKLEDMLRRVREVIKRIEDELRRE

SEQ ID NO: 22058 - protein, 55 aa, Artificial Sequence
  Synthetic
ERVIERIKELLDRNRKELEDVARDAERLNRELNERVDRVLKEVEERLKELEDRVK

SEQ ID NO: 22059 - protein, 60 aa, Artificial Sequence
  Synthetic
DKAKELEEEIRKIIREIEELLRRMEETSRKSSKESEKHLRDAHEDSRRIAERIKDLLRKE

SEQ ID NO: 22060 - protein, 55 aa, Artificial Sequence
  Synthetic
EDVIRELERLLRELKKRIEDVVRRIKELNEDNNRKVEKIREDDERLLEKVRRDVK

SEQ ID NO: 22061 - protein, 60 aa, Artificial Sequence
  Synthetic
SAAEDVLRKVEKIIKEIEELLKRALEESRKSVKELEKILRDAHEKSRKIAREIEDALRKR

SEQ ID NO: 22062 - protein, 55 aa, Artificial Sequence
  Synthetic
DEVVEEIKRLLEELRKKIEDVADEIRRLNEEVNKKLDDLVKTDTKLLEDVDRKVK

SEQ ID NO: 22063 - protein, 60 aa, Artificial Sequence
  Synthetic
SAAEEVRKKNEKISRELEKLNRKALEDSRDSIRKLKKILDDAHKDSREIIKEIEDLLRKR

SEQ ID NO: 22064 - protein, 55 aa, Artificial Sequence
  Synthetic
DEVVEEIKRSNDENNERSKKVLDEIKKLNKEVNDRVEELLERDKRELERVKRDVD

SEQ ID NO: 22065 - protein, 60 aa, Artificial Sequence
  Synthetic
DEFRDIEERAKELAEENETINRRVLTEHKKLIDELREILERVLREHEKRLKDLKDLVRKI

SEQ ID NO: 22066 - protein, 55 aa, Artificial Sequence
  Synthetic
EEILERIRKLLEDVEEKVKKSVEDSRRLLKTIREEVERVLDTSRKLLKRLEDDVR

SEQ ID NO: 22067 - protein, 61 aa, Artificial Sequence
  Synthetic
SDLEEVEKRAEEIIRRNKEELEKVLRESKDIIDKNRKLNKESLDEVKRIIERLEDLLRKDG

SEQ ID NO: 22068 - protein, 58 aa, Artificial Sequence
  Synthetic
EEVRKVAKKIRDEAKKSHDESKKLNDTSRDLVRKSKEEAERIDEEMKKLLKEIKDKVR

SEQ ID NO: 22069 - protein, 60 aa, Artificial Sequence
  Synthetic
SEVEEILKRIEDLARTLLKLNEDSLRRNEEIIRTIKELNEKTLKENKEIIDRLRELLRRT

SEQ ID NO: 22070 - protein, 55 aa, Artificial Sequence
  Synthetic
ERVLKEIEDLLREVADRSRKFNERSERLLREVEERSREVNDRSKKLMDTIAKEVK

SEQ ID NO: 22071 - protein, 58 aa, Artificial Sequence
  Synthetic
SEVEKALERVKKLAEDLERLDKESLERVEKVIRDAERLDKTSREEVKKIADEADDLRR

SEQ ID NO: 22072 - protein, 55 aa, Artificial Sequence
  Synthetic
EEVLRRIRRLLEEVRKKVEDSNRELKRRLDELEKRVRDSNKEIRELVKEVERKVN

SEQ ID NO: 22073 - protein, 60 aa, Artificial Sequence
  Synthetic
SRLEEVLRRIRKLLRDNKETAKRVLEEIERLLREADKRNREALKEIEKRMREVEDKLRKA

SEQ ID NO: 22074 - protein, 59 aa, Artificial Sequence
  Synthetic
EKDLEELRRRVKEVSDESRKLLEDLLDEARKVLEENRKLVEEILREAKKVIDEIEEKLR

SEQ ID NO: 22075 - protein, 60 aa, Artificial Sequence
  Synthetic
SELEKVLREIRRLLDEARKRNEEFLRRIEELLRRNEEEVRRVLEKIERKVERVKRDLERR

SEQ ID NO: 22076 - protein, 59 aa, Artificial Sequence
  Synthetic
EEKLERILRTARKVVEDNERLVREVLKKVKRVSDESRRLLEEIDREVDEVIKRLEERAK

SEQ ID NO: 22077 - protein, 59 aa, Artificial Sequence
  Synthetic
SEAEEIRRRLEEISRRSVEHLRKVLEEIKRISERSKRHLDRVLEENKRRLEELRELLER

SEQ ID NO: 22078 - protein, 56 aa, Artificial Sequence
  Synthetic
EEVLRELEELLKESEERIKRIEEEIKKIIDKSREDIKRVLEEIERLNKKAADDLRK

SEQ ID NO: 22079 - protein, 59 aa, Artificial Sequence
  Synthetic
DEVREVLEELKRISDDSIRHLEEVLRRLREIIERLKATNDDVLRELEEIIRTLLDLDRQ

SEQ ID NO: 22080 - protein, 56 aa, Artificial Sequence
  Synthetic
KEALDTLERTVEESKKRIKEILDRVKELIDKAREDSKRSVEEVRRRIEKARRDLDR

SEQ ID NO: 22081 - protein, 59 aa, Artificial Sequence
  Synthetic
SKVDELLKRLEDIIRKLDKENEKVLRELEEISKRSVDHLKRVLEENRRILEELERLLEG

SEQ ID NO: 22082 - protein, 56 aa, Artificial Sequence
  Synthetic
ERVLRDLKRLVDEARRRSERSLEEVKRIADESRKEIERILREIEEENRRAKDKLRR

SEQ ID NO: 22083 - protein, 59 aa, Artificial Sequence
  Synthetic
SRAEDLLRRLEKIIRDSLRHLREVLKRLERIIDELRKTNERVKEELERIIDTLRKLKDN

SEQ ID NO: 22084 - protein, 56 aa, Artificial Sequence
  Synthetic
EEILRRARELVDESRRRLEKVVKEVRDVIRTLKKDSDKSLRDLEEEVRKAEEDLRK

SEQ ID NO: 22085 - protein, 59 aa, Artificial Sequence
  Synthetic
DEVRELLDTLRRIIERSVKHLEDVLRDLKRIIDKLREDNRRVLEENRRRLEELDKLRKE

SEQ ID NO: 22086 - protein, 56 aa, Artificial Sequence
  Synthetic
EEFLRDVERLAEESRRRLEAVEREVERLITEAEKESKKSLDEVERLNRELKERLKK

SEQ ID NO: 22087 - protein, 60 aa, Artificial Sequence
  Synthetic
DVEDILRTIRDLIRRVDEKSRKTLEENRRAIEEVLRRSDETLRRNKKLIEDVEEEVRRTV

SEQ ID NO: 22088 - protein, 59 aa, Artificial Sequence
  Synthetic
REFMETVLRKIKEDIERLEERNREVHEKSREEIRKLEEENEEVHRKSRKEIDEIRKELK

SEQ ID NO: 22089 - protein, 60 aa, Artificial Sequence
  Synthetic
DVEEILKEIRKRIEDVKRESEKTLKEIRDLIKKVAEDIERSVKENRELIDKVRRELERDV

SEQ ID NO: 22090 - protein, 59 aa, Artificial Sequence
  Synthetic
RKVLTDVLKEIERRIDELRRRNEEVVEKIKREIKKLEDESKRVNDESREIIKRIKEEVD

SEQ ID NO: 22091 - protein, 60 aa, Artificial Sequence
  Synthetic
DVEEIIREIRKLIEKVLRDVRRSAEENKKLIDEVKRRVEEMLKRNRDMIKKVLDDVRREV

SEQ ID NO: 22092 - protein, 59 aa, Artificial Sequence
  Synthetic
REFLKKVLDEIREIIERLRRESEKVNEDSKREIKDIERELREVHKKSRRIIRRIEEKLR

SEQ ID NO: 22093 - protein, 60 aa, Artificial Sequence
  Synthetic
DEAREVLERLKKISEEDKRRSDKVNEETRRIIKEAEERSRKVNEETKRIIEKLEEDLRDR

SEQ ID NO: 22094 - protein, 56 aa, Artificial Sequence
  Synthetic
EEILRELREILRENTERVERSLRDNRRLLDELRKKVERSAEENERLLREAEEKLRK

SEQ ID NO: 22095 - protein, 60 aa, Artificial Sequence
  Synthetic
SEVDKVLDDSRKSAEDLRREIETVLKRNKELIDENRKRLKEVLDRNAKLADDLRRERKKG

SEQ ID NO: 22096 - protein, 56 aa, Artificial Sequence
  Synthetic
ERVVRTLEKLIEEWRKAVEDVLRTLEKLTEEAKRESERILEELKRITKELRDEERR

SEQ ID NO: 22097 - protein, 59 aa, Artificial Sequence
  Synthetic
SEVEDVLRRLEELLRRLEKKSRESLEELRRRLDEVRKDSERSNEDSERLIRELEEIRRK

SEQ ID NO: 22098 - protein, 56 aa, Artificial Sequence
  Synthetic
KEFLDTMRRIVEELKKRLKEVNDRIKDIVRRAEEELKRSNDENKERIERAEKKVRD

SEQ ID NO: 22099 - protein, 59 aa, Artificial Sequence
  Synthetic
SELEKVLEELKKLLEELERESDTSVKELRTLLERLEEESKESNERSKRLAEELERRLKD

SEQ ID NO: 22100 - protein, 56 aa, Artificial Sequence
  Synthetic
REFLETMERIIEELEKRLREVNEDLKRIVRTVAERLKKSNRDNRELIRTLKDRVRT

SEQ ID NO: 22101 - protein, 59 aa, Artificial Sequence
  Synthetic
SEVEDVLRRLEELLRRLKEKSKKSNEESKKLIKELKEESDKSRRDLERLLEKLDRDLKR

SEQ ID NO: 22102 - protein, 56 aa, Artificial Sequence
  Synthetic
REVLERMRELVEKLKEDLERSNKENKDLIDKVKRDLEEVNRRLEKIVREVKERVRT

SEQ ID NO: 22103 - protein, 59 aa, Artificial Sequence
  Synthetic
SEVEDVLRRLRELIEELRERSERSNEESKRLADELEKRSEESLRRLAELLRKLEEDLRR

SEQ ID NO: 22104 - protein, 56 aa, Artificial Sequence
  Synthetic
REVLTTIAKIVTDLERELRKSNEENKKLIDELRKRLEDSNKRVKEIVKRLEEEVRR

SEQ ID NO: 22105 - protein, 60 aa, Artificial Sequence
  Synthetic
KDVEEALKELERVLEELKRLSKELLDRLRELADRIRRISKELLEELKRLLKDIKETVDRI

SEQ ID NO: 22106 - protein, 56 aa, Artificial Sequence
  Synthetic
EDVLRRLRELIEKVKRDLDRTDETLKELIKTLEDELRKSNETIEDLIRRLEEALRK

SEQ ID NO: 22107 - protein, 60 aa, Artificial Sequence
  Synthetic
SDLERLLDELRKLLDDLRRKSEELLRRLDTLAKKIEREAEKITKDNKELIDRLRDRLRRI

SEQ ID NO: 22108 - protein, 56 aa, Artificial Sequence
  Synthetic
ERMLRTLERLIEKLKEELKRTDKELERLIRELKKRLDDNNRRNEELIKRVEDELRK

SEQ ID NO: 22109 - protein, 60 aa, Artificial Sequence
  Synthetic
SEAETVLEEMKEVSKRTEEKNKKVEDDDKRSIDELRKKLEKVLREDRRSIEDLERRLKEN

SEQ ID NO: 22110 - protein, 56 aa, Artificial Sequence
  Synthetic
EEVLRTIERLSRENKKKDEDTLRKSKEEHERVREELERVLETSRREHEKVKKRLED

SEQ ID NO: 22111 - protein, 60 aa, Artificial Sequence
  Synthetic
RVEEMLERLRRLHEEVKRRIDEVLRELEEESKRNEERIRRVLERLRDEHRKLKETLDRRN

SEQ ID NO: 22112 - protein, 59 aa, Artificial Sequence
  Synthetic
EEELERLERKSRESIERLKDTLRELKERLKRISDRSDEKLREAEKRSRESIEEVKKRAK

SEQ ID NO: 22113 - protein, 60 aa, Artificial Sequence
  Synthetic
EVEDVMREARKLHKELEDKIRDAARRIRETIDRVKKEDDDSLRKLRKLHEDLKRELEKRN

SEQ ID NO: 22114 - protein, 59 aa, Artificial Sequence
  Synthetic
RDELRKLLEDSKRSIEKVEDDLRKLEEKIKRVIDDNRRKNKELEEKSRKSIRDLEEEVR

SEQ ID NO: 22115 - protein, 60 aa, Artificial Sequence
  Synthetic
EVEDVLRELRKEHDDLRKEITDVLRRLEKLHRELDEEDERSVKRIRELIEEVMRELRKRN

SEQ ID NO: 22116 - protein, 59 aa, Artificial Sequence
  Synthetic
RKDLKALKEDSKRSIDDIRRKLEEARRRSERSIDENRKLNKRVIEKIREIIRRLEEKTK

SEQ ID NO: 22117 - protein, 59 aa, Artificial Sequence
  Synthetic
EVEDVLREAERLHRTLLKEIRDALRRLRKLIEDVKRKDDESLKRLREKLERLKESLERN

SEQ ID NO: 22118 - protein, 59 aa, Artificial Sequence
  Synthetic
REELKKLLEDSKRSLDELRRRLKEVEDRVREAIKKNEDENRKLERRLDKIIEDLERRVK

SEQ ID NO: 22119 - protein, 60 aa, Artificial Sequence
  Synthetic
SEAEKILKEIRDISDRTREELKKVKDEHKTLIDRLREILERALREHDRLAKELEDIKRKI

SEQ ID NO: 22120 - protein, 56 aa, Artificial Sequence
  Synthetic
EEVLREISKIIKDNHDEVTEVLKESEELIRRLRKEVEDVRRTSEKLIRELEERVRE

SEQ ID NO: 22121 - protein, 58 aa, Artificial Sequence
  Synthetic
SEVDDVLRRLEELIKTLEDINRKSLEDIKKLIDDLRKILEDALRKHEKLIRELREMKK

SEQ ID NO: 22122 - protein, 56 aa, Artificial Sequence
  Synthetic
KEFLDRMREEIRRLEEESRKSDETIERLIRELRRRVEEVLKTSTDLIRELEEEVKK

SEQ ID NO: 22123 - protein, 61 aa, Artificial Sequence
  Synthetic
SSVERVLEAVKELAKKLAEDIRRSLEHIRRLLEEVEKKHRDSKEHVRKLLKDLRDIAREKG

SEQ ID NO: 22124 - protein, 59 aa, Artificial Sequence
  Synthetic
DKELKKILDELRKLIRKVLEALRELNKRAKEILDRVAENVKEVNERLERLVRRIAEEIR

SEQ ID NO: 22125 - protein, 61 aa, Artificial Sequence
  Synthetic
SSVERVKEEVEKLLEKLEREIRKSLKTIRELLRELKRKHEESKEHVRRLLEKAEREARRRG

SEQ ID NO: 22126 - protein, 59 aa, Artificial Sequence
  Synthetic
DKKLEEILRRAKELIDRVLEELKKLNEELRRIIEEIVRNVKRVNEKLEKLLRDIKRRID

SEQ ID NO: 22127 - protein, 61 aa, Artificial Sequence
  Synthetic
SSVEEVLRRVKELLKTLKKKHEDSKRTVKELLDDLRKKHEDSKRHVRKLLEELEKRARERG

SEQ ID NO: 22128 - protein, 59 aa, Artificial Sequence
  Synthetic
DKELKRILEEVKELVKRVLENVERVNREVRERLKEVSRNVERVNKEAKELVDEVEERAR

SEQ ID NO: 22129 - protein, 61 aa, Artificial Sequence
  Synthetic
SSVEEVRKRVRDLIKRYREEVEKIKKDVRRLLDELREEVKRSLDHVRKLMEELRRKIKRDG

SEQ ID NO: 22130 - protein, 59 aa, Artificial Sequence
  Synthetic
DKELKRILDELKERLERAKRENEDSVRKLRKLIEEILREIRRLNKEAEDLIREIEERAR

SEQ ID NO: 22131 - protein, 61 aa, Artificial Sequence
  Synthetic
KDVEEVLTRVRELLRRVEEEIRRSEEHIRRLLEELRRKHEESKDSIRKLLEDLEEKVRRRG

SEQ ID NO: 22132 - protein, 59 aa, Artificial Sequence
  Synthetic
RKDLEEILREVEKLVEEVERRLRKLNEELKEILRTIVENVERVNRRLEELIRDIKRRVK

SEQ ID NO: 22133 - protein, 57 aa, Artificial Sequence
  Synthetic
SEVEKIVEEVKKIVEEVERLHRKLLEDLRRVVEEVEDRSRRINEEAKKIVEDLKRRG

SEQ ID NO: 22134 - protein, 55 aa, Artificial Sequence
  Synthetic
EEVLKEIEDRLERLRRRAEEVNDTARKIVREVEESLKRSVESLKKLVDELRETLR

SEQ ID NO: 22135 - protein, 57 aa, Artificial Sequence
  Synthetic
DEVERLLEEAKKIVEEMKRLHEEILREVEEIVRELDEKHDKLLRDAEEIVKELKKEG

SEQ ID NO: 22136 - protein, 55 aa, Artificial Sequence
  Synthetic
EEMRRRLEKLVRDLREKSREVNERIDKLLEELHEKSERVKKTIDDLVEEVKDTLT

SEQ ID NO: 22137 - protein, 57 aa, Artificial Sequence
  Synthetic
KEVEDILREVKKIVDELLRRHRELLERARRIIKRLKEEHDRLLKELEEIVRDLTRKG

SEQ ID NO: 22138 - protein, 55 aa, Artificial Sequence
  Synthetic
EEILRRIEELLKRLRDDAKRVNDELKRLVEELRKRSKEVNDELRRLLKELEDRLR

SEQ ID NO: 22139 - protein, 57 aa, Artificial Sequence
  Synthetic
SEVEEILKEVERRVDELTRRHEELLRKADEIVKDIRRKLEEINKRLKDIADDVRRKG

SEQ ID NO: 22140 - protein, 55 aa, Artificial Sequence
  Synthetic
EEILRRIETLLEELERRSKRVNDELEKLVRELKEELERSKRSIDEILKKVSKDLK

SEQ ID NO: 22141 - protein, 57 aa, Artificial Sequence
  Synthetic
DEVERLLEDLREKVKRLVKKHEDILREVEKEVRRILRTSEEINREAEEIIRELDKRG

SEQ ID NO: 22142 - protein, 55 aa, Artificial Sequence
  Synthetic
EDVLRDVDRLLRELREKSKEVNKRIKELLDKLKTDLERSKEHLERLVKTLKDKLR

SEQ ID NO: 22143 - protein, 57 aa, Artificial Sequence
  Synthetic
DEVEDLVRKLKKRVDDLLAEHKRLLDEAEKIVREVLKKSRESNERNKKVSKEVRERG

SEQ ID NO: 22144 - protein, 55 aa, Artificial Sequence
  Synthetic
EEVLKTLDRLVEELRKASEDVNRELDKLLKDLEKKLRDSIRHLEENHKDVRRALE

SEQ ID NO: 22145 - protein, 60 aa, Artificial Sequence
  Synthetic
DEVEKVLKEIRKRVEDSLRHLEKVNKEAREIVEKVREELRESNERLREIVKTIRDRLEKL

SEQ ID NO: 22146 - protein, 55 aa, Artificial Sequence
  Synthetic
EDVRRTVEELVRRSEKAIEDSRRSIEDLVRRLKEDIERSLRSVEKLVEELTEAIR

SEQ ID NO: 22147 - protein, 61 aa, Artificial Sequence
  Synthetic
SEVEKVLEELRRIVTKSARHLDESNERLKEIIRRLDEKNKEALKRAEDIIRDIDDKLKKLK

SEQ ID NO: 22148 - protein, 55 aa, Artificial Sequence
  Synthetic
KKVKDEVKKLIDDSREKIKRSRESVKRLVEEHRRRSEEVRKTLEKLAREITERIR

SEQ ID NO: 22149 - protein, 57 aa, Artificial Sequence
  Synthetic
DELEEVADEVRKIIEDLERRLREVVKTSEKLNKENRRRTEDVEKEVEKILRELEEKL

SEQ ID NO: 22150 - protein, 59 aa, Artificial Sequence
  Synthetic
DEDIRKVLKELREIIKEVEDMLKEVLDRNRKLIEDNLRRLKEVLDRLRKKVREIEEEAR

SEQ ID NO: 22151 - protein, 58 aa, Artificial Sequence
  Synthetic
SEIEEAEERVRRLIERNKRETDRVAEEVKRINDENRRATEKVKRDVKRILDDLRRKLE

SEQ ID NO: 22152 - protein, 59 aa, Artificial Sequence
  Synthetic
DKLLRDVLRDLERLVRKNLEELKRVLDELKRLMEDNLRRLEKVLEELERLVREIVERAR

SEQ ID NO: 22153 - protein, 58 aa, Artificial Sequence
  Synthetic
EELERVAKKVRDINRRNKEETKRVEDEVRRLIKENEDTSREVVRRNEEILKDLERKLG

SEQ ID NO: 22154 - protein, 59 aa, Artificial Sequence
  Synthetic
RDVVREVLERLKELVKRNLDKLKRVLDEIRRLIEENLDELRRAHEEHRRIAEDIRRKAK

SEQ ID NO: 22155 - protein, 57 aa, Artificial Sequence
  Synthetic
ESLERVKEEVKKILEKNRRTSEEVARRVKELIDRNREKSKDVARKNEKILEDLERKL

SEQ ID NO: 22156 - protein, 59 aa, Artificial Sequence
  Synthetic
EEEVERVLRRLRELVRENEKRLKEVLDEIRRLIRENEEKLEKAHREHKKLAEEVERRKR

SEQ ID NO: 22157 - protein, 59 aa, Artificial Sequence
  Synthetic
DDVERVLKEVRELVERANEEIRKVLERDRKSNEDANRKIREVLRRVEELVDRIDKIRRE

SEQ ID NO: 22158 - protein, 55 aa, Artificial Sequence
  Synthetic
DEVVKKIKELLDRHRKTTEEVLERIRRSLEKHRRDSEEVMKELRRLVKELEDRTR

SEQ ID NO: 22159 - protein, 59 aa, Artificial Sequence
  Synthetic
DEVRELLRTIEELVRDANRKIKEVLDRDRESNDRANKTLEEILKRDKRSNEDVEEKLKK

SEQ ID NO: 22160 - protein, 55 aa, Artificial Sequence
  Synthetic
KKVEKKIRDLLKKHEEDSRKALEDIKRSLERHRERSEEVLKRIRDSLRELDKKTK

SEQ ID NO: 22161 - protein, 59 aa, Artificial Sequence
  Synthetic
DSVEEILKRVKELVDKANEKIKEVEERVRRSDEELKKILEEILREIEKLVREVEEIARR

SEQ ID NO: 22162 - protein, 55 aa, Artificial Sequence
  Synthetic
DEVKKKIKDLLEKHERDSRKVLRKLEESSKETEDRAKEVLERIEKLLEDLRRETK

SEQ ID NO: 22163 - protein, 59 aa, Artificial Sequence
  Synthetic
KDAEELLKRVRDLLKRSLESLEKILRDSKELADRWRKKLEDLLRESEELVDRAEKILRR

SEQ ID NO: 22164 - protein, 55 aa, Artificial Sequence
  Synthetic
ERVREELKKLLTRVEEEHRKVLETDKKLLKELHKESKEVNDRDRELLERLEESVR

SEQ ID NO: 22165 - protein, 59 aa, Artificial Sequence
  Synthetic
KDAERLLRELKKLLEESLKSLKELTDRIRDEVRRVKKRLRDLLRESEELVKRAEDILRR

SEQ ID NO: 22166 - protein, 55 aa, Artificial Sequence
  Synthetic
EEVEETAKKLLDEVRRAHEEVLKEIRELLRDLERTVREVNEEDKKLLRKLEEDVR

SEQ ID NO: 22167 - protein, 56 aa, Artificial Sequence
  Synthetic
SEAEKVRKDLKDIADDLHRVSERVLREDERLLKRLHDVSRDVRERDREIVEDLRRG

SEQ ID NO: 22168 - protein, 55 aa, Artificial Sequence
  Synthetic
EEVLDRARKEVDEIKKKHKKVLDESRKLVAEAERKHEEILKESEDLAREIKERER

SEQ ID NO: 22169 - protein, 56 aa, Artificial Sequence
  Synthetic
SRAEKVREDLDRIEEDLRRVHREVLKEVERILKELHDTSKRVRDEVEKIVRDLRRA

SEQ ID NO: 22170 - protein, 55 aa, Artificial Sequence
  Synthetic
EKVLEDARKLVRESKENIRRVLEDLKRIVKKLKEDHKRILDELKKLVDKIKEDAR

SEQ ID NO: 22171 - protein, 56 aa, Artificial Sequence
  Synthetic
SRAERVREEIDKILEDLHRVSERIKRELTKLMEDLERTHERIKKAIREILADLRRR

SEQ ID NO: 22172 - protein, 55 aa, Artificial Sequence
  Synthetic
EEVLKEAKKLVDDLKEKHKEVLTRVERLVEESKKNLKRVLDELRDLVRRVKEEAK

SEQ ID NO: 22173 - protein, 56 aa, Artificial Sequence
  Synthetic
SEAERVREELDKIVEDLHRTSEDVKRRDEELLKDLERRHKEVKEEDEKILKDLRDS

SEQ ID NO: 22174 - protein, 55 aa, Artificial Sequence
  Synthetic
ERVLEELRKTVTEMKKRHRDILRESEELARESKENVDRVLEESRRRAEEIKRRAK

SEQ ID NO: 22175 - protein, 56 aa, Artificial Sequence
  Synthetic
DERERVKEELDKLLRDLERVHDKVREDDKRLLDDLRRVHEKARRDDKRILDELKRA

SEQ ID NO: 22176 - protein, 55 aa, Artificial Sequence
  Synthetic
EEVLERAKELVKRSKENVERVLRDSERLAKESKENVRRVLEESKRRVEEIEERAR

SEQ ID NO: 22177 - protein, 56 aa, Artificial Sequence
  Synthetic
SEAERVREELKRILEDLERVHREVEEAIERIVEELEDVHRRARERVERILRELERR

SEQ ID NO: 22178 - protein, 55 aa, Artificial Sequence
  Synthetic
EEVLKEIEKMVKESRDTVRRILEELRELVERSKRNVEKVLRDLERAVEKIERDAK

SEQ ID NO: 22179 - protein, 56 aa, Artificial Sequence
  Synthetic
KEAEDARRRVDEILEELRKLHDEVRKTDKELLDDLEREHERVKREDDKILDTLRRQ

SEQ ID NO: 22180 - protein, 55 aa, Artificial Sequence
  Synthetic
EKVLEDLERLVETSRKTVRDILEESKELVKRSKENVRRVLERSKELVKRVSERAK

SEQ ID NO: 22181 - protein, 60 aa, Artificial Sequence
  Synthetic
SDVDEARKTVKKILDESEETLERVRRELERILRDSERTLKRVEERVRRILRDLERELRKL

SEQ ID NO: 22182 - protein, 59 aa, Artificial Sequence
  Synthetic
REEIDKVLKEIRERVERSKKHLEDVLDRLRKIIEESKRHVEKVLEKLEKIVKELKDELK

SEQ ID NO: 22183 - protein, 60 aa, Artificial Sequence
  Synthetic
KDIEEVEKRVREILEDSRRMSKKDEESTRRILEESRRVSEEDKKSTEEILKELKDELRKL

SEQ ID NO: 22184 - protein, 59 aa, Artificial Sequence
  Synthetic
RDTIKKMLEEIKRRVDESKRHLRESNKRIRDIAEESKKHLEDSNKKVRDRADELKKRLK

SEQ ID NO: 22185 - protein, 60 aa, Artificial Sequence
  Synthetic
SDLERVKKAVEDILRDSERTLRRARERLKRLLEELRRTSEEDKKSTDEILERLKRELEKL

SEQ ID NO: 22186 - protein, 59 aa, Artificial Sequence
  Synthetic
RDELRKLLEEIRRRAEESKRHIEEVLKRLEEIVKRLKEELKRSNDEIREIVRRLEEELK

SEQ ID NO: 22187 - protein, 57 aa, Artificial Sequence
  Synthetic
STLEEMEKEVEKLNRDSRRTLREVAERVEELNRDNERTSKRVEDAVRELNKRLRDEV

SEQ ID NO: 22188 - protein, 59 aa, Artificial Sequence
  Synthetic
EEELRKVLKENEELARELKKELERALEENRRLHEENKEDLRRVLEENERLHRKLRKDAK

SEQ ID NO: 22189 - protein, 57 aa, Artificial Sequence
  Synthetic
DTLERVAEAIRRLNEDLKRTLEKVERAVREILKRLAETLKRAEEEVRRLNRDLERKV

SEQ ID NO: 22190 - protein, 59 aa, Artificial Sequence
  Synthetic
EEEIKKVLDDNKKLAEDLKRELKRVLEEIRKLVKELEDIVREVLKTNKELHERLKRRAD

SEQ ID NO: 22191 - protein, 57 aa, Artificial Sequence
  Synthetic
DTLERAAEEVKKLNEDNKRTSKRVEDEVRRLNRENEEMSKRVKDTVKKILDDLRRKV

SEQ ID NO: 22192 - protein, 59 aa, Artificial Sequence
  Synthetic
EKEIERVLRELERIARENKKELEKVLRENRELHERNKKLLEKVLRDIKRLAKTLRDRTR

SEQ ID NO: 22193 - protein, 57 aa, Artificial Sequence
  Synthetic
RELEEARERVKRLNEENKEFSRRVAEEVKKLNEENERTSKKVEDEVRKLNEDLRKKV

SEQ ID NO: 22194 - protein, 59 aa, Artificial Sequence
  Synthetic
EETIKRVLEELTRIMDRNRKDLRRVLEENKKLHDENRKELKRVLDENRRLHEEVKKRAK

SEQ ID NO: 22195 - protein, 57 aa, Artificial Sequence
  Synthetic
SELERVKTEVEKLNRRNREATERVKEEVKKLDEENKKSSKRVEDEVRKILDELRKKV

SEQ ID NO: 22196 - protein, 59 aa, Artificial Sequence
  Synthetic
REELERMLKRLKEIIERNEERLKEVLDRIRELIERNKELLRRVLKRIRDLVKELKERAD

SEQ ID NO: 22197 - protein, 57 aa, Artificial Sequence
  Synthetic
RELEEVERRVRELNEDNRRKTEEVKREVKRIDDDNRRASERAAREVKKLNKDLKDKV

SEQ ID NO: 22198 - protein, 59 aa, Artificial Sequence
  Synthetic
EKTLEDMLRRLKEIIKRNKDELEKVLRDIKKLVDDNKRDLERVLRRNEELHRELLERAR

SEQ ID NO: 22199 - protein, 57 aa, Artificial Sequence
  Synthetic
DELERAKEEIERLNDELKKSLEEVEKEVEKLDDDNRRTSRRVSEEVKRLNKELEDEV

SEQ ID NO: 22200 - protein, 59 aa, Artificial Sequence
  Synthetic
RDTIRKVLKENEDLIRKLEEILKKVLDEIRRLIEDNKRELEDMLRKNKELHDRLRERAR

SEQ ID NO: 22201 - protein, 57 aa, Artificial Sequence
  Synthetic
SELEEVKKEVEKLDERNKRLSKRVEEEVRKLNEENKRATERIKREVEKILEDLRRKV

SEQ ID NO: 22202 - protein, 59 aa, Artificial Sequence
  Synthetic
REELKRMLDRLRRIIEENERKLKEVLDRLRDIIRKNKEDLKRALERIKKLVEDLKRRAT

SEQ ID NO: 22203 - protein, 59 aa, Artificial Sequence
  Synthetic
SDLERVLDEIRRLAKEVKDTLRRMLEKNEELSKRDEDKTREMLKEIERLVKELEEIADK

SEQ ID NO: 22204 - protein, 59 aa, Artificial Sequence
  Synthetic
DDRLRKAEEEIKEIERDLKRTLDEVAKEVKRTIDRNRETSKRAAREVEKLLEKLREKTR

SEQ ID NO: 22205 - protein, 59 aa, Artificial Sequence
  Synthetic
SDLERMLREIRKLVEDDKRRTREMLRDNERLSREDKKKTDDVLRRLEELVRRLEEILKK

SEQ ID NO: 22206 - protein, 59 aa, Artificial Sequence
  Synthetic
DKRLDDIRRAIEEIIRDLRRASKKASEDVERTIERNERTSEEAKRRIEELIERLRRTDK

SEQ ID NO: 22207 - protein, 59 aa, Artificial Sequence
  Synthetic
SDLEEALKRVEKLVRDDKEKTKRMLERNRELVKRNKEKNKRMLDEIRRLVEELEDILRR

SEQ ID NO: 22208 - protein, 59 aa, Artificial Sequence
  Synthetic
DKRLKEVEDAVREILKDLKRTSERAKEEIERTIRDNERVVRRLEEEARKILEDLERRDK

SEQ ID NO: 22209 - protein, 59 aa, Artificial Sequence
  Synthetic
SRIEELLKTVEKLVDEVKKALRKLLEENKDLARKSKESLERLLDEVRDLVRRLEEILDR

SEQ ID NO: 22210 - protein, 59 aa, Artificial Sequence
  Synthetic
KDKLERVMRTLDEILKDLERTVERVKRALDESNRDLRREHERIKKELDKILDRLREKAR

SEQ ID NO: 22211 - protein, 56 aa, Artificial Sequence
  Synthetic
SEVERLKEELDKLHKENREVLEDSKRSLDKILDDVRKLAEDVKKRLDDILKELRDR

SEQ ID NO: 22212 - protein, 59 aa, Artificial Sequence
  Synthetic
RDLLRRLLREAERVSEETKKESKKLNDEIRKVLERLRDELRKIEDEIRKVVRRIRERAN

SEQ ID NO: 22213 - protein, 56 aa, Artificial Sequence
  Synthetic
DEVETLKKRLDKLHEDNKRDLERSKRSLEELLKELEEVVRRSEKTLDELLKKVEDQ

SEQ ID NO: 22214 - protein, 59 aa, Artificial Sequence
  Synthetic
RKLLKELEDTIRKVSDDTRRKSEELNEELKTVAEEIKKRSRELNEEAKDVLEKVERRTT

SEQ ID NO: 22215 - protein, 57 aa, Artificial Sequence
  Synthetic
DEVERAKEKLDKILEDLRDVVRRSKENLDRLHEENRETLERSKKNLDRLLEKVKKDG

SEQ ID NO: 22216 - protein, 59 aa, Artificial Sequence
  Synthetic
RRDIERILRELEKVLKKLTDESERLNREVERVSRDTKKKSKELNEELKRVLDEVKRKAD

SEQ ID NO: 22217 - protein, 60 aa, Artificial Sequence
  Synthetic
DEVREVLRELKKVVDDSKRDLDRVLREAERVVKESKDDIKRLLEETERVARDVERKIREN

SEQ ID NO: 22218 - protein, 55 aa, Artificial Sequence
  Synthetic
ETLDKEVKRLLKESKRAADELRERIKRLIEESKRLLDTVRREDKKILEKIERDLK

SEQ ID NO: 22219 - protein, 57 aa, Artificial Sequence
  Synthetic
DEIEKILEDLRRISEDTKRKHEEILRELEEILRELEERHRRILREVEEVARRLEERL

SEQ ID NO: 22220 - protein, 59 aa, Artificial Sequence
  Synthetic
EEKVKEVEREIRRLLKENEDASREVERLIEELKRRLDKISEDVERVLKKILERIDRATK

SEQ ID NO: 22221 - protein, 56 aa, Artificial Sequence
  Synthetic
RSVEEAEKVLEELKRRNERLNEEHRREVEKVREKNERLNKRHREDVERIKRELDKE

SEQ ID NO: 22222 - protein, 59 aa, Artificial Sequence
  Synthetic
DETIKDVLRKIKKISDETRKTLEDTLRELREISEKTRRRLDESLKELEEILRRLKEETR

SEQ ID NO: 22223 - protein, 60 aa, Artificial Sequence
  Synthetic
REAEEIRKEVEKLLRDLKRALDEHRETSRRLVEELKDILRKNREEVERLVREIREVIKRV

SEQ ID NO: 22224 - protein, 55 aa, Artificial Sequence
  Synthetic
RELIEEITRIVEKAKKELREVSKRLREIVKKIKEDNDRSNKRLREIAKEIKDRLT

SEQ ID NO: 22225 - protein, 60 aa, Artificial Sequence
  Synthetic
SEREEARERVKDLSRKLKEINERSEKHLRDLAKENRDANRRTREEVERLLDKIRKVIKDV

SEQ ID NO: 22226 - protein, 55 aa, Artificial Sequence
  Synthetic
EELIRELEKIVRDAEKKNRDVNREVRKILEDSKRELEKVLRDLERKVREIEKELK

SEQ ID NO: 22227 - protein, 61 aa, Artificial Sequence
  Synthetic
RELEEVLKKLKEDAERLKRILEEATRELEKILERLHRLNEKSTEELRRIVKDLKEELKRRG

SEQ ID NO: 22228 - protein, 55 aa, Artificial Sequence
  Synthetic
EEVEKTVRKLEEDLKRAIEKHEEDSRRLVKRLKESNDEHEKESRRLVRELEKEIE

SEQ ID NO: 22229 - protein, 59 aa, Artificial Sequence
  Synthetic
DEVREVIKTVRKLLEDLHRTNREVIERVKRTSEETHRKNEDMLRRLRKLVEDLKETLDR

SEQ ID NO: 22230 - protein, 59 aa, Artificial Sequence
  Synthetic
EKSLRDAEREVKKLLEELKRSLDKLREDVERLLRENKESLDRLREEVKKIERELREKTR

SEQ ID NO: 22231 - protein, 59 aa, Artificial Sequence
  Synthetic
SDVDRVLEELRKLVEELHRRNRKIIEDLRRASEKTHRKNRDLLEKAKKLADELREIAER

SEQ ID NO: 22232 - protein, 59 aa, Artificial Sequence
  Synthetic
KDELRRLEEAAKKILDDLEDSLRKLEEAVKDLKRKNKKSLDDLAEAAKDILRRLAETAR

SEQ ID NO: 22233 - protein, 59 aa, Artificial Sequence
  Synthetic
DEAEEVIKTVKRLLDELHRRNEEAIKEDRRLVEELHRTNEKVLREVEELVKRLAEILRR

SEQ ID NO: 22234 - protein, 59 aa, Artificial Sequence
  Synthetic
KETLDRLRERAEELKRRLEKSLRDLNRDNERTKRELRESLRKLEETARRLKEEIDRRTK

SEQ ID NO: 22235 - protein, 60 aa, Artificial Sequence
  Synthetic
DEADDLIRRVRELVKRVKEALEDLLRRNKDVLRKVKEELEKITRRNRDKVRRVEEELKRI

SEQ ID NO: 22236 - protein, 59 aa, Artificial Sequence
  Synthetic
SRKLEELRKEVEKLKEELDRVLEEARKEVEKSNRELKEVLERHAEDNERIKRRLDEARR

SEQ ID NO: 22237 - protein, 60 aa, Artificial Sequence
  Synthetic
SELERLLDEVDRIVREIEERLRDILRKNRELSEDSERKLRELLREVRDLVRRIMDELRRT

SEQ ID NO: 22238 - protein, 59 aa, Artificial Sequence
  Synthetic
REKLEEARRRIDEIRRRLEELLKRAREDSDRSNKRNKDLLREIEEELKKLKRELDEETR

SEQ ID NO: 22239 - protein, 60 aa, Artificial Sequence
  Synthetic
SLKEKVKKVIEDLKRAIDDLLRKVREESKKSNDHIRKLLEDSERTLRDLARRIKKLKDDG

SEQ ID NO: 22240 - protein, 59 aa, Artificial Sequence
  Synthetic
ARLIKEVIEEAERLLREIAKRIRKVIEEDRDLNRRIAKKLDELNRRAEELLKRIADRAK

SEQ ID NO: 22241 - protein, 59 aa, Artificial Sequence
  Synthetic
SSKETVKDVLRKITKRIRDLVRESKKTSDESNKHIKELLERSKKTIDELERRIEDLRRR

SEQ ID NO: 22242 - protein, 59 aa, Artificial Sequence
  Synthetic
EELLRRLIKELEDLMREIERKLRELNERDKRLNEEIAKKLEKLNRDARKLVEEIERRAR

SEQ ID NO: 22243 - protein, 59 aa, Artificial Sequence
  Synthetic
KLREDLEEMLRRSEKHIRDLVKRSEETSRDSNRHIEKLLKDSRKTIEDLKRKIEDLARK

SEQ ID NO: 22244 - protein, 59 aa, Artificial Sequence
  Synthetic
RELLERLIRELKRLNEEIAKKLEDLNREDRRLNEEIAKRLRDLNEELKKLVEDIERRAR

SEQ ID NO: 22245 - protein, 60 aa, Artificial Sequence
  Synthetic
RSKEEVDKMLERLRERIEKLVEESRKTSKESNEHLEKLFRESEETIKELKKRIEDLRRKG

SEQ ID NO: 22246 - protein, 59 aa, Artificial Sequence
  Synthetic
EDLLEKLIRELEELIRRIEKKLRDLNREDRELNKRIADEIERLNREARRLIEEIRKRAE

SEQ ID NO: 22247 - protein, 59 aa, Artificial Sequence
  Synthetic
SLEEEVRREIERSRRHIEKLVRDSERTSKESNKHIKKLLDESKRTLDEIRKRIEDLARK

SEQ ID NO: 22248 - protein, 59 aa, Artificial Sequence
  Synthetic
REVLKELIRELRRLNEEIRKKLEKLNDEDRRLNEEIRRKLEEINEELRRLVREIEERAR

SEQ ID NO: 22249 - protein, 60 aa, Artificial Sequence
  Synthetic
SLEETVEEVLRRLRRKIEKLVTESEETIRRSKKHIEEVLEKSKRTLDKIKEDIDRLRKEG

SEQ ID NO: 22250 - protein, 59 aa, Artificial Sequence
  Synthetic
REVLKELIDRARELIERIARKLTELNKENRKLNEEIARRVEELNKELKRLLKEIEDRAR

SEQ ID NO: 22251 - protein, 60 aa, Artificial Sequence
  Synthetic
STKETVARELERSRKHLEDSFREAERAIKESEEHIRELLERSRRTLKEIEDRIRDLRRRG

SEQ ID NO: 22252 - protein, 59 aa, Artificial Sequence
  Synthetic
ERLLRELIEELRRLNRKIHEDNRRLIEDNKRLNEEIKRELDKLNRELERETEEIKKRAD

SEQ ID NO: 22253 - protein, 57 aa, Artificial Sequence
  Synthetic
SVRETLREVLKESKKHLDDLVRRVKEEIERSKKHIDDLIRRNKESLDDIRRTVEEKI

SEQ ID NO: 22254 - protein, 59 aa, Artificial Sequence
  Synthetic
SDLVRELIKRLKEINDRVAERIKDIIRKVREANKDLERKLRELNKRSRDVLEEVVRAEE

SEQ ID NO: 22255 - protein, 57 aa, Artificial Sequence
  Synthetic
SAAEEAEKASKDSEKHIKDLIRRLREVSEESRRHLRRLIEENKRSLEEIEKEVRKKV

SEQ ID NO: 22256 - protein, 59 aa, Artificial Sequence
  Synthetic
TELIKRIIDRNREINRRVAEAIKKIIKDNRDINEDLERKLRKLNEESKRVLDDVVRREK

SEQ ID NO: 22257 - protein, 57 aa, Artificial Sequence
  Synthetic
SVEERLKDELRKSEEHLRRLIRELEKALEDSKRHADRLIKENRDSLRRIEDKARKKI

SEQ ID NO: 22258 - protein, 59 aa, Artificial Sequence
  Synthetic
DETVKRIIEENRRINEDLARKIKEIIRDNKRFNEEVEEKLKRLNDTSEEILRRLVRRDE

SEQ ID NO: 22259 - protein, 57 aa, Artificial Sequence
  Synthetic
SVDKELEEVIRRSKDHLEKLIKEAEDALKRSEEHLRKLIEEVKRRLEEVEKRVREKV

SEQ ID NO: 22260 - protein, 59 aa, Artificial Sequence
  Synthetic
SELIKRLIKENKEINEKLAREIEEIIKENKRINDELKKRLEELIERLERILEEVERRER

SEQ ID NO: 22261 - protein, 57 aa, Artificial Sequence
  Synthetic
SVDRTLEEVIKDSRRHVKELIDRLEKVIKESEENVKRTVDDNERSLKEIADTVRREI

SEQ ID NO: 22262 - protein, 59 aa, Artificial Sequence
  Synthetic
SEDIKRLIDTNRKINRDVAETIKEIIKEVRKINKEIDDKARELNKESRRVLEEVVRAER

SEQ ID NO: 22263 - protein, 57 aa, Artificial Sequence
  Synthetic
SVAETLRKVLKESEENVKRTVDRAEEELKKSEEHLRRLVERLKEVLEDVRRRVEEEV

SEQ ID NO: 22264 - protein, 59 aa, Artificial Sequence
  Synthetic
DERVERIIRELREVNERLDREVERLIRENREINRRLAEEIKDLIRRLREILREVVERAK

SEQ ID NO: 22265 - protein, 57 aa, Artificial Sequence
  Synthetic
SIAEKVEKVLKESKENLDETIRRAEEDLKRSRDHLRKLIEENKRSLDRIKEEVDRRI

SEQ ID NO: 22266 - protein, 59 aa, Artificial Sequence
  Synthetic
SDAIEKLITDLRKINEEADRKVKEIIKRNRDINKKVEDDLRELNKESTTVLREVVERER

SEQ ID NO: 22267 - protein, 60 aa, Artificial Sequence
  Synthetic
SELEKIIEDARRVLEEDERRNREVNRKLRKILEDNERLNREVNKRLREILKRLKEELKRL

SEQ ID NO: 22268 - protein, 55 aa, Artificial Sequence
  Synthetic
EEAKRALDKIREDVRKILEDTKRELEDVRRRVEEILRETREELKRVEDDVKRAED

SEQ ID NO: 22269 - protein, 60 aa, Artificial Sequence
  Synthetic
SELEDIIRKLDEILKRNEEENRRVIRRLRELLEEDERRNRKAIEDLERIITKLKDDVRKL

SEQ ID NO: 22270 - protein, 55 aa, Artificial Sequence
  Synthetic
RDAERRIREVEEEVKRILEETEEVLRDVKRRVDEILKTTEDRIREIEEEIKRTVK

SEQ ID NO: 22271 - protein, 60 aa, Artificial Sequence
  Synthetic
DELRDIIRELRDILRENKKRNEDAIRKLRKILKENEKKNRDAIRELEDILEKLRKEIEDL

SEQ ID NO: 22272 - protein, 55 aa, Artificial Sequence
  Synthetic
RKVEEDIKRVEEEVKKILDKTDEELKEVERRVRKILRETEEELKRVEDEVRRAKT

SEQ ID NO: 22273 - protein, 60 aa, Artificial Sequence
  Synthetic
REEEKARRVMEKLKRDVDRINTRHRDILKKIEDEVRRIDEEHKTEVKKIKDRAEEIIRRI

SEQ ID NO: 22274 - protein, 55 aa, Artificial Sequence
  Synthetic
KDLIREVEKILKDIEDLVRESERELREILKDIKRMVDESLKRLEDILRELEERTR

SEQ ID NO: 22275 - protein, 60 aa, Artificial Sequence
  Synthetic
REEEEMRKVVKDLEDAARELDRDHETKLRRIEEEVKKLNEEHKRELERIARRIKEIIDRI

SEQ ID NO: 22276 - protein, 55 aa, Artificial Sequence
  Synthetic
KDLIRRLEEILRRIARELEDSLRKLEKILEEIKEIVKKSLDELRRIVDELEKRVR

SEQ ID NO: 22277 - protein, 60 aa, Artificial Sequence
  Synthetic
SEEEEVRRVLKRIAEEVKRLDEDHRRILEEIRKKVEKSSRDHKRELDKIKRDADEIIRRI

SEQ ID NO: 22278 - protein, 55 aa, Artificial Sequence
  Synthetic
KDLIKKLEEILEEIRRLLEESLRELEDILKKVHDRNARTLERLREILKEIEDRAR

SEQ ID NO: 22279 - protein, 60 aa, Artificial Sequence
  Synthetic
DEKRKVDKRLKEIEETIRRLLEEHRRELDEIRKRIEEISRRHRKELEDIEREVRKIISRI

SEQ ID NO: 22280 - protein, 55 aa, Artificial Sequence
  Synthetic
EDLIRDVERVMREVKRDLERSLEELRDVVRRAEEEVRATLRKLREILKKVEDETR

SEQ ID NO: 22281 - protein, 60 aa, Artificial Sequence
  Synthetic
SEEETMRKVVKEIREKVRRISERHKEELERITDALRRSSKRHEDELREIEKAVREIIRRI

SEQ ID NO: 22282 - protein, 55 aa, Artificial Sequence
  Synthetic
DKLIRELEEILERLEREVRKSLDRLRKILEDIHRTNKDTLDRLREILKKVEDRTR

SEQ ID NO: 22283 - protein, 59 aa, Artificial Sequence
  Synthetic
SEVEEVIRRLEELVDRLHKINKRAIEENERLNRELHEKNRDIIRKLKELVERLRDIKEK

SEQ ID NO: 22284 - protein, 59 aa, Artificial Sequence
  Synthetic
KETADRARDEVRRIEKELDDSLRELEKRVRDSKRHLDRSLEELEKVVDEIRKELEDLAK

SEQ ID NO: 22285 - protein, 59 aa, Artificial Sequence
  Synthetic
KEVEEVIKRLRELVDRLEKENRDVNEDNKRLNEELHDRNRKMIEELRRLVTELEDIRRK

SEQ ID NO: 22286 - protein, 59 aa, Artificial Sequence
  Synthetic
KDLLKRVEDEARKIEEKLKRIHEETKKVADDSERHLRKSLRELEKVAREIKKRLEEERK

SEQ ID NO: 22287 - protein, 59 aa, Artificial Sequence
  Synthetic
DEVREIIKDLRRLLKELEERNREINDRNKKLNDTLRKELEDIKRRLEKLLRELEKIVRE

SEQ ID NO: 22288 - protein, 59 aa, Artificial Sequence
  Synthetic
EEVLRRVEEEVRDIERRLDKIHEDTRDTAEKSERHLDALLRDLERVAREIEEALDRLKD

SEQ ID NO: 22289 - protein, 59 aa, Artificial Sequence
  Synthetic
SEVEEVIRRLRELLRTLEEENRKMIRENERLLEELKKRNEDIERELRKLVTELAKIADK

SEQ ID NO: 22290 - protein, 59 aa, Artificial Sequence
  Synthetic
EKLARELREVAERIKKRLDEIDETTRRMVTESIKRLEEIDKRTTERAREIKKELRDRAT

SEQ ID NO: 22291 - protein, 59 aa, Artificial Sequence
  Synthetic
SEVEDLIRRLEELLDRIRRDNERIIKELEELLRELEETNKRLIERIRKLLEDLRDTVRK

SEQ ID NO: 22292 - protein, 59 aa, Artificial Sequence
  Synthetic
EKLMREAKEAVDRIKKRLDEINKRTEDVARRIRKRLDEIDERTKEEAKRIKEELDKEEK

SEQ ID NO: 22293 - protein, 59 aa, Artificial Sequence
  Synthetic
SEVEELIERLKELLERLEELNRRVNEENRRLNEELERRIRKAIEDLKDLLRRLDDIRRR

SEQ ID NO: 22294 - protein, 59 aa, Artificial Sequence
  Synthetic
EKKLRELKEVVDRLKKEIKRIDEETRKEAERSKRNLEKILRDLEREAKRLKEEIDKKAR

SEQ ID NO: 22295 - protein, 59 aa, Artificial Sequence
  Synthetic
DEIRDLLRRLRELNKRIADRIRKLNEENKKLNKEVADKIRKLNREAREIIKTIAEIIKS

SEQ ID NO: 22296 - protein, 59 aa, Artificial Sequence
  Synthetic
KEVLDRAKEEVDRSRKHLKELLDRSRETSDRSRRHLKDLMRRSRETIRKLDEELKRLEK

SEQ ID NO: 22297 - protein, 59 aa, Artificial Sequence
  Synthetic
SEIEKLIREAERIIEEIAKEIKDLNEENERLNREVDKRLTDLNRRAKELLEEVKRIIDR

SEQ ID NO: 22298 - protein, 59 aa, Artificial Sequence
  Synthetic
EEKLRDARREIERLRRELEKLLEDSRRTSEESRRNLERSLDESRKTIEELIKRLDDAER

SEQ ID NO: 22299 - protein, 59 aa, Artificial Sequence
  Synthetic
SEIEKLIEDAKRILEEVARRLKKINEDNDRLVRKIADELRRLIEEAKKILDEIKKIIED

SEQ ID NO: 22300 - protein, 59 aa, Artificial Sequence
  Synthetic
EDVLREVRKVIKKLRDELEELARRSRKTSEDSRKRLDDLLKRAREVIEELKKRLEDLRR

SEQ ID NO: 22301 - protein, 59 aa, Artificial Sequence
  Synthetic
KDIEKLIKDLEKLNRDIAKRIRDLNETNKKLVRDVAEEIKRLNEELKKLLEDIRRIIER

SEQ ID NO: 22302 - protein, 59 aa, Artificial Sequence
  Synthetic
EEVLKRAREMVKRSKEHLDELLKRSEDTSRESKRRLEKLLKESEDTIRRLEEELKKAEK

SEQ ID NO: 22303 - protein, 59 aa, Artificial Sequence
  Synthetic
KEIEELLEEIERILREIKKDLERINKENEKLNREVKKKIEDLIREVRKIIEEIRRIIER

SEQ ID NO: 22304 - protein, 59 aa, Artificial Sequence
  Synthetic
ERKLKEVRDTIEELKKRLEKLAKESRDTSRRSRENLERLAREFREEIKRLKKELEEART

SEQ ID NO: 22305 - protein, 59 aa, Artificial Sequence
  Synthetic
SEIEKLIRDAEKILEEIAELIKRLNEENKELNERVAKRIKDLNEELRRLLKEIADIIRR

SEQ ID NO: 22306 - protein, 59 aa, Artificial Sequence
  Synthetic
REELEKVRKVIDKLREELKRLERESERTSEESRRNLERLLRESRKTVEEIKKRLDELRK

SEQ ID NO: 22307 - protein, 59 aa, Artificial Sequence
  Synthetic
SDIERLIAELEKLNKEIEDKIRELNRENRRLNKEIDEEIERLIEEARKIIEDIREIIRR

SEQ ID NO: 22308 - protein, 59 aa, Artificial Sequence
  Synthetic
RKKVEEARKKIEDSKRHLEELLRDSRRTVKESNDNLRRSAEKARREIKRLEEALKELRR

SEQ ID NO: 22309 - protein, 60 aa, Artificial Sequence
  Synthetic
DEVEKVVRELEEVLRRNKELLEKTKKETKEALDRNRELLEDTKRKTREILERLKKVIKEG

SEQ ID NO: 22310 - protein, 59 aa, Artificial Sequence
  Synthetic
EEVVKRLRDILRRVKEAAEELHRDDERELRRVEKELEELHKDDRRVVEEVKDDVRKAEK

SEQ ID NO: 22311 - protein, 60 aa, Artificial Sequence
  Synthetic
SDAERVVRELRKILKEIEDTIRKSKKETKEMLDRNRELARKVKEELKEILRRLEKMKRDG

SEQ ID NO: 22312 - protein, 59 aa, Artificial Sequence
  Synthetic
ERLLRELRRIVEEVKRAVEELNRDDRRTLERVKREAKKIHEDLRRVVEKLERDVEEARR

SEQ ID NO: 22313 - protein, 60 aa, Artificial Sequence
  Synthetic
DEVEKLKRELDKILEDLERLHRRLEEELRRIHEENRDLSRRTKEELDRILKRIEELLRER

SEQ ID NO: 22314 - protein, 59 aa, Artificial Sequence
  Synthetic
EKVLEELRRILRRVEEAVRRLNERSEEVLRDVERRDEELNEDNKRRLEEVKKRVEDLLR

SEQ ID NO: 22315 - protein, 60 aa, Artificial Sequence
  Synthetic
SELDELKKSLEEIHRRDREKNRKLKEDLKRILDEIRKRLEESKKRLEEILREIERLLRER

SEQ ID NO: 22316 - protein, 59 aa, Artificial Sequence
  Synthetic
EKALKELRKILEDVARANEELNRDTRRTLERVEEEVEKLNRDHKRVLEKVERDVRRLTK

SEQ ID NO: 22317 - protein, 60 aa, Artificial Sequence
  Synthetic
SEVERLKEELKRILEEIKKLVDDSKKDLERIHREDKKKNEDLKKRAEEILREIRDLLTKR

SEQ ID NO: 22318 - protein, 59 aa, Artificial Sequence
  Synthetic
EKLLRDLRRVLEEVKRAVDEISKDHKRMLDAVKKANEELNDDSRRVLERVDREVKKAEK

SEQ ID NO: 22319 - protein, 61 aa, Artificial Sequence
  Synthetic
SELDRVREEAKRIDDENRKRSEDSVRDSERLLREIEELHRETKERSEELLKRVEEIVRDRG

SEQ ID NO: 22320 - protein, 59 aa, Artificial Sequence
  Synthetic
DRLLEELEKVLRESARRNERIITENRRTMKRVSEEVEKLNRDDKRRMEELEKRAREIIT

SEQ ID NO: 22321 - protein, 61 aa, Artificial Sequence
  Synthetic
SELERAVEELEKLLKELEDLHRKSKEDSKDMLRRVEELHRRTKEKSKRILEEIERRITEEG

SEQ ID NO: 22322 - protein, 59 aa, Artificial Sequence
  Synthetic
DELMRKLEEILKRVAEAIKRLIDDDRRVLKRVAEEVKKLNEDDKRVADEVSERIKERLT

SEQ ID NO: 22323 - protein, 61 aa, Artificial Sequence
  Synthetic
DELEEAEERLREIDKRNEDLHEESRKESKRLLDELRKLVEDVKRELEKILEEAKDIVRKRG

SEQ ID NO: 22324 - protein, 59 aa, Artificial Sequence
  Synthetic
KEKLEKLRDVLRESERRNRELIEEDKEVMRRVSEEVKKLIDDLRRALEKAARDVEKIRR

SEQ ID NO: 22325 - protein, 61 aa, Artificial Sequence
  Synthetic
SELEDAERRAEEIDRRNKRTVERVEEELEKILREVEELHRRTEEKSKRILDEIRRKIRDRG

SEQ ID NO: 22326 - protein, 59 aa, Artificial Sequence
  Synthetic
KELADKLRDVLRRSAEENKKIIDRLRKILEDVARAVEELIKRDKRVMEEVKKEIDKLLT

SEQ ID NO: 22327 - protein, 58 aa, Artificial Sequence
  Synthetic
SEVEEIKKRARKLLEEVREIVDRVKKLHERLLREIEKTNREAKREHKRVLDTIRDIFR

SEQ ID NO: 22328 - protein, 58 aa, Artificial Sequence
  Synthetic
ETVADLDREIRRLKDELRRILEDLRRVSEEVKKELEKLTRDTRRVSKEVKDELKKVEK

SEQ ID NO: 22329 - protein, 60 aa, Artificial Sequence
  Synthetic
REVDEIKKRLTEMLETVRKIVEEIRRELEKLLEDVREINERVKEEHERILKDIRDVARKI

SEQ ID NO: 22330 - protein, 58 aa, Artificial Sequence
  Synthetic
ETMEDLKRRVREVEKRLEEILRRLDDVVRKIKEELKKLTDDTRRVSKRVKDDLERTRT

SEQ ID NO: 22331 - protein, 58 aa, Artificial Sequence
  Synthetic
SRVEEIKKELRRLLEEVRKKNEESKERDRRLNDTIRRELEEIIRRLRKLLEEIRRLRE

SEQ ID NO: 22332 - protein, 58 aa, Artificial Sequence
  Synthetic
RTVEDLRRVVEKVLRDIKRSIDDVRRENKKSNEDARRWLEELKREVKRLKDELREIEK

SEQ ID NO: 22333 - protein, 59 aa, Artificial Sequence
  Synthetic
SEVERIKRELERLLKEVKDANKRVKDTLRKLLRDVEEMNRRVKRENHELLRRLDELVKA

SEQ ID NO: 22334 - protein, 59 aa, Artificial Sequence
  Synthetic
EELLKDVRKVAKEVEEELKKLHDDTKRVADKVKEDLDRLHRDSERNARRSEEEMDKRRK

SEQ ID NO: 22335 - protein, 59 aa, Artificial Sequence
  Synthetic
DRVREVKERLKKLLEEVERTNREVMERNHRLLEDVERKNRRVKEENHRLLEELKRLRED

SEQ ID NO: 22336 - protein, 59 aa, Artificial Sequence
  Synthetic
ERLLEDVERTAERVERELDRLHEETKRNADRSREELEKLHRDSEKNARDSAKELEKIRR

SEQ ID NO: 22337 - protein, 59 aa, Artificial Sequence
  Synthetic
DEVERAEEELERLLRELKKLHEDAKERARELLKRIEDVNRKVKEELKRLLDTIRKLREA

SEQ ID NO: 22338 - protein, 59 aa, Artificial Sequence
  Synthetic
KDLLEKVKRVVEEVHKRSRELNEDTRRVIDKVEKDLDELHRDSRRVVETVKEELEKLRK

SEQ ID NO: 22339 - protein, 59 aa, Artificial Sequence
  Synthetic
KEVEEVKRRLREVLKRLKEMHERVKRELEKLLKKVEDFNRDVKRKNHDLLRRLEELKKA

SEQ ID NO: 22340 - protein, 59 aa, Artificial Sequence
  Synthetic
KDLLEDVEREARRLHDESRKLNEDTKRVVDTVTEELKKLHRDSERNAKRSEEEMDKRRK

SEQ ID NO: 22341 - protein, 59 aa, Artificial Sequence
  Synthetic
DEVERVKETLDKLLDDVRKLNEEVKKRLEELLEKVERDNRKVKEDNHRLLEEVKDLKRR

SEQ ID NO: 22342 - protein, 59 aa, Artificial Sequence
  Synthetic
KDLLEDVERRAKRVEEELDKLHEDTRREADRVRRDLRRLDEDTKRNVDESRKELEKTRK

SEQ ID NO: 22343 - protein, 60 aa, Artificial Sequence
  Synthetic
SEVEEVIRRIRALVEEIARKNEDILRKNRKLLEDLRELVERVIKEIKELIDRLADEVRRV

SEQ ID NO: 22344 - protein, 59 aa, Artificial Sequence
  Synthetic
DRVRKEVEEVLRDVEERIRRLDEEVRRRAEESERELERLREKVEDMIEKVKRALEELRR

SEQ ID NO: 22345 - protein, 60 aa, Artificial Sequence
  Synthetic
SELEEIIKKLRKLVEDVARRNEELIKKLEETNKRLEDEVRELIEEIKKLIDELAETVKRI

SEQ ID NO: 22346 - protein, 59 aa, Artificial Sequence
  Synthetic
EEMKKRLRDVAEKLKEDVRDLDRKVKKVAKESHERNRRILKELEEVAARVTERLEELRR

SEQ ID NO: 22347 - protein, 55 aa, Artificial Sequence
  Synthetic
DEDERVDEVIKKVREDLRKLLEDSERVVKRSKEELDRWRKKVEDVMRDSDRRLEE

SEQ ID NO: 22348 - protein, 55 aa, Artificial Sequence
  Synthetic
EEVIKELKKLIDKLREDSKKTIEENKKMNKDAADEIEKIIEDNRRLIKRIEEEDR

SEQ ID NO: 22349 - protein, 55 aa, Artificial Sequence
  Synthetic
SEDERVEEVVKRIEDKLRRLLEESKRVVDDSKRRLDEWRKEVEKVVKKSTDDLEK

SEQ ID NO: 22350 - protein, 55 aa, Artificial Sequence
  Synthetic
EEVIKELEELIERLARISKKTIEEDRRVNKELAERIKEIIERNRRVIEEARERLR

SEQ ID NO: 22351 - protein, 59 aa, Artificial Sequence
  Synthetic
KELEELIEELERLNREINERAKELIKKLRKLNEEVARRHERLIEELRRILEELKELLER

SEQ ID NO: 22352 - protein, 59 aa, Artificial Sequence
  Synthetic
EELRRRAKRVLEESKRNIEKVAEDVTRVLRESEESLERLRERSERVLREVEKTIRDMAR

SEQ ID NO: 22353 - protein, 59 aa, Artificial Sequence
  Synthetic
SEVERLIEELDELNRRINEKHKKLRRELEELNKRVAERHEELIRRLRKLLEDLERLARR

SEQ ID NO: 22354 - protein, 59 aa, Artificial Sequence
  Synthetic
EELRKRVEDALRRSKENIKRLEEESREVLRRSEKSIDELRRESERVLKEVKEEIERVRK

SEQ ID NO: 22355 - protein, 59 aa, Artificial Sequence
  Synthetic
SELEELIKELRDLNRRINKRVDDLADELRRLNERINRRHEELIKELRRLLEDLKRKFDR

SEQ ID NO: 22356 - protein, 59 aa, Artificial Sequence
  Synthetic
EELKKRADDVLRESKENIERVERKIRRVLEESEENIEDLRRRSKEVLDEVRKRIEDIRR

SEQ ID NO: 22357 - protein, 59 aa, Artificial Sequence
  Synthetic
SELEELIRRLKELNKDVNEKHKRLIEELEKLNRDINERHKELIEELERLLRRLEKLLRD

SEQ ID NO: 22358 - protein, 59 aa, Artificial Sequence
  Synthetic
EDLRREAERVLRESEENIKELEDRSRDALRRSEENIRRLKKESEDVLREARREVERLER

SEQ ID NO: 22359 - protein, 59 aa, Artificial Sequence
  Synthetic
SLEEELDKVLKESRDNVRRVEEELEEVMEKSERAAEKLRRDLDRVLEELEKMIRDLKRR

SEQ ID NO: 22360 - protein, 59 aa, Artificial Sequence
  Synthetic
REDIKRVIDTLRKLNERLNREVKEVIKRNEELVRRLAERVKKVVEDLRRLVKRLDDEVR

SEQ ID NO: 22361 - protein, 60 aa, Artificial Sequence
  Synthetic
SLEETLKEVLRKSEENAERLKRELEKVLRKLEEDLRRLDERLDEVLKRSRDEARKLREAD

SEQ ID NO: 22362 - protein, 59 aa, Artificial Sequence
  Synthetic
REVIKRVIEDLDRLNDELNKEVEEVIRRLEDIVRELEKKIREVIKRNKELVDRLEEKVR

SEQ ID NO: 22363 - protein, 59 aa, Artificial Sequence
  Synthetic
DLEKRLRDVLKESDENIEELRRELREVLKESEDNVKKLAEENKEVTDRLREEIKRLKEE

SEQ ID NO: 22364 - protein, 59 aa, Artificial Sequence
  Synthetic
KEEIERVIRELKDLNRRLNEELKRAIKRIKELNKRLNELSKRSIDELRRLVEELERRVK

SEQ ID NO: 22365 - protein, 61 aa, Artificial Sequence
  Synthetic
SLKEKLEEVLRRSEENVERLRKENEDVAKKNREAIEEIKKRLDDVLRELRERIERLKKEGV

SEQ ID NO: 22366 - protein, 59 aa, Artificial Sequence
  Synthetic
EEVIDRAVEELKKLNDDLNRTVKKVIRESEELTETLRKDVKRVVDDLRRLVEELARRVK

SEQ ID NO: 22367 - protein, 59 aa, Artificial Sequence
  Synthetic
DLEEELKEVLKESEENIERLKRENDRVVEKNKKAVDDLRERNKRVTERLREEIERLKRR

SEQ ID NO: 22368 - protein, 59 aa, Artificial Sequence
  Synthetic
KKDIKRVIDELRKLNEDLNRRVKEAIKTSEKITDDLRRMSEESEKELRELVRRLEERVR

SEQ ID NO: 22369 - protein, 60 aa, Artificial Sequence
  Synthetic
SEVEEIIRRIDELIKRLAETVKEIVDRLRKLNKKLNDENREIIKEIRDLIRELAKEVKRI

SEQ ID NO: 22370 - protein, 59 aa, Artificial Sequence
  Synthetic
EEVRERLERVLRRVEEVIKRLKEELKKVLDESRKNVEDVTRENEKVLDEVRKTIDELRR

SEQ ID NO: 22371 - protein, 60 aa, Artificial Sequence
  Synthetic
SEVEELIKTIERLIKELEKLNEEIIKRLRDLNKRLNERNEEIERTLRKLITDLARMVREV

SEQ ID NO: 22372 - protein, 59 aa, Artificial Sequence
  Synthetic
EEVLRRLEEVLDRVKKKIKTLTDKNREVLERSRENVKKVTEDNERVLRKLKEDIERLRK

SEQ ID NO: 22373 - protein, 60 aa, Artificial Sequence
  Synthetic
SELEEALKDIKRLIDKLRKDNEDIIRRLRETNDELRKLNKKIIDEIRDLIRRLEEVAKRI

SEQ ID NO: 22374 - protein, 59 aa, Artificial Sequence
  Synthetic
KDLKKRLEDVVKRVREEIEKLTRDNERVLEESRRTLEKLTRENEKVLREVKKKIDDLRK

SEQ ID NO: 22375 - protein, 60 aa, Artificial Sequence
  Synthetic
SELEDVEEKIKRLIDRLRELNKKIEDDLRKLAKELADLNKKIIREIEELIRRLAEVVKRI

SEQ ID NO: 22376 - protein, 59 aa, Artificial Sequence
  Synthetic
EELKRRLRKVLERVKREVEKSSERNREVVERLRKELERLTRENEEVLKRVKKEIERLEK

SEQ ID NO: 22377 - protein, 60 aa, Artificial Sequence
  Synthetic
SEVDEVIKRLDELIEELRKRNDDIIREIEKLIKRLEEENKEIVDRIRELIKRLEDMVRRL

SEQ ID NO: 22378 - protein, 59 aa, Artificial Sequence
  Synthetic
KDVLDRLREVLDRLRKEIERLTRKNEEVLKDVRRRVKRSSEENEKVLKEVRERIERLKK

SEQ ID NO: 22379 - protein, 60 aa, Artificial Sequence
  Synthetic
SDVDEVIKRLRELIRENHKRNKKIVDEIRELIRELKERNKKIVDEIRELIKRLKDIVRRL

SEQ ID NO: 22380 - protein, 59 aa, Artificial Sequence
  Synthetic
EEVLRRVEEVLRELREAIKRDDEENKKVLEEARKTVEDSSRENKRVLEEVRRRLDEERR

SEQ ID NO: 22381 - protein, 59 aa, Artificial Sequence
  Synthetic
SEKERAEEVFRESKKNIDDVKRKLERVLEDSKRTLDELRKEVEKVLKESEDELRKLARS

SEQ ID NO: 22382 - protein, 55 aa, Artificial Sequence
  Synthetic
EELIREIRELNKRLNDTIEDVIRRMKDLNRRLAEVIKEIIERNKKLIEDAARRIK

SEQ ID NO: 22383 - protein, 59 aa, Artificial Sequence
  Synthetic
REKERLKEVVEKSRRNLEKLREDSERVLEKSRRTLERLKKEVEEVLKESEERLRELARS

SEQ ID NO: 22384 - protein, 55 aa, Artificial Sequence
  Synthetic
EELIKTIEDINRRANEESKRTEKELEDINRKLEEDIKRIIDRNRKMIEDAARKIK

SEQ ID NO: 22385 - protein, 59 aa, Artificial Sequence
  Synthetic
REEERLEEVLRRAEEILKRLEDEVRKVVEDSKKNIEDVRREVEEVLKKSEDRLRKLARD

SEQ ID NO: 22386 - protein, 55 aa, Artificial Sequence
  Synthetic
EELEKRLKEILDRAAEEIRRIIRELEELNKEANDRIRKIIKENEDLIREAEERTR

SEQ ID NO: 22387 - protein, 59 aa, Artificial Sequence
  Synthetic
ELEERIKKANEDSKRTLRELMERVRKANEDSKRKLEEIREKVERANRESKKILDELRKA

SEQ ID NO: 22388 - protein, 59 aa, Artificial Sequence
  Synthetic
EKVIRELIKELKDVNRALEKKAKELIDELEEVDKDLEDKVRELIRKLKEVNEDLKRKAD

SEQ ID NO: 22389 - protein, 59 aa, Artificial Sequence
  Synthetic
SLKERVKKVLEESERNLEENKKDAKRVNDETRKKLKELEDRADRVNRETERALRELEDN

SEQ ID NO: 22390 - protein, 59 aa, Artificial Sequence
  Synthetic
EKVVREVIEELKRVNDKLNDASRRLNERLKRVVEDVERRVRDLNKELEDVVEELKERTR

SEQ ID NO: 22391 - protein, 59 aa, Artificial Sequence
  Synthetic
ELEERIKRVIDELRRRLEELRRELKRVNDKTEEDLRRLEDNARRVNDTSRKMLERLEDG

SEQ ID NO: 22392 - protein, 59 aa, Artificial Sequence
  Synthetic
ETVVREIIRELEKVIEELEREVRELNRELREVVERVAKKVRDLNRELEEVIRDVKRKVD

SEQ ID NO: 22393 - protein, 59 aa, Artificial Sequence
  Synthetic
SLEDEARELRRKSEKTNDELRRAIEELEKKVRDMIRRSEEHVRDLVRKVKRVIEKLEED

SEQ ID NO: 22394 - protein, 59 aa, Artificial Sequence
  Synthetic
RKDLEELIKELKKLNDESREEIERLIRELEELLKEIEDRNRKLAETLKRLLEEVEKRAR

SEQ ID NO: 22395 - protein, 60 aa, Artificial Sequence
  Synthetic
SIEEEIKELKDRSKKTNEELKKEIDELKEDSERTNRESRKHVKEVLDRLREILERLRREG

SEQ ID NO: 22396 - protein, 59 aa, Artificial Sequence
  Synthetic
RKEIKRLIDELTELNKRSKELIKRLIEELKKLNDDSRKENKRLVREVERLAEEVDRRVK

SEQ ID NO: 22397 - protein, 59 aa, Artificial Sequence
  Synthetic
SLEEKAKRLKEESDKTNKKLRELIERLERESRRTNEELRKKIRELLEDARRELDRLRKE

SEQ ID NO: 22398 - protein, 59 aa, Artificial Sequence
  Synthetic
EKKVEELRRDLERLDRESEKKIRDLIKTLDELNKESDRKIRKLEEELKRLLEEVEKRVR

SEQ ID NO: 22399 - protein, 59 aa, Artificial Sequence
  Synthetic
DIEKKIEDLRRKAKKVIDDLRKRSDELKKRSKDTNDRLREELKKLEEDVRRVIEDLRRR

SEQ ID NO: 22400 - protein, 59 aa, Artificial Sequence
  Synthetic
DKDIEKLIRDLEKLLRDVEERHEDLRRKAEELDRDTKEKVDRLIKELKDLLKEVRDRVR

SEQ ID NO: 22401 - protein, 60 aa, Artificial Sequence
  Synthetic
SLKEKLDDLVRKSDDTNKDLEEKARRLVEDAKRVLKELEDKSRRLVEEARKVLKRLEEEG

SEQ ID NO: 22402 - protein, 59 aa, Artificial Sequence
  Synthetic
DKKIKELIEELEDLDRRSKKAVEDLIKELKKLIDEVREIHDRLEEELRRLIKTVRDKAR

SEQ ID NO: 22403 - protein, 59 aa, Artificial Sequence
  Synthetic
SLEDKVRKLEEEIKKVLKEIREEVERLLEEDRRTLEDLKRRHRESDRESKEVLDEIAKK

SEQ ID NO: 22404 - protein, 59 aa, Artificial Sequence
  Synthetic
DKVIKEVIDTLRKRLEELKRRLEDVIREVRKANEDSERESRDVIRKLKELLERLKEKVK

SEQ ID NO: 22405 - protein, 60 aa, Artificial Sequence
  Synthetic
SEEEKLKEVKDRIREVLRKLEEHTDKVKKEVEKVLRDIRRTTDELKKEVRAMLERLRRKK

SEQ ID NO: 22406 - protein, 55 aa, Artificial Sequence
  Synthetic
DELVTEVEKLLRDDEETNRDVVKKVREAVKKDADTNRKVIEEVKKVLEDAARRLD

SEQ ID NO: 22407 - protein, 60 aa, Artificial Sequence
  Synthetic
SEEEKLERVERRLEKVLDEIRRHTEDVKRKDEENLDRLRKKIEKLKRELEKVLRDLEEKR

SEQ ID NO: 22408 - protein, 55 aa, Artificial Sequence
  Synthetic
DELVKKLEELLEEDKDTNRKVVKEIEDANRRVNEELDRVIEELKRILEELERRLR

SEQ ID NO: 22409 - protein, 59 aa, Artificial Sequence
  Synthetic
SEVDEVRKTLEDLLRRLDEENKDIIRRNKELLDDLDRKVREAIERLKRLLDELRKILEK

SEQ ID NO: 22410 - protein, 59 aa, Artificial Sequence
  Synthetic
EELARRITELEKRVREVIERLKEKNKRLEDDSRRVITELRKKLKDLEDRVREEIEELRK

SEQ ID NO: 22411 - protein, 58 aa, Artificial Sequence
  Synthetic
SEVERVKEELKRLLEDLDRKNKRMIDEDERLNKELNEENERLIRELEELLKRLKEIRD

SEQ ID NO: 22412 - protein, 59 aa, Artificial Sequence
  Synthetic
EEVKREIDKLREEIREVIERLDKKNEDVLRKSEKNVRDLNRENEEVLRRATEAVRELER

SEQ ID NO: 22413 - protein, 59 aa, Artificial Sequence
  Synthetic
DEVDKVTRTLEELLKRLEEENRKMIEDDKRLNEELNKENRRVEETLRKLLKELEDIRKD

SEQ ID NO: 22414 - protein, 59 aa, Artificial Sequence
  Synthetic
KEVKEKIDRLEKRIRDAIRELNERNKKALDDSERNVRELNKRNERLREEVERKIRELER

SEQ ID NO: 22415 - protein, 59 aa, Artificial Sequence
  Synthetic
SEVDEVAKRLRDLLRELEEKLKRAEDRDRKLNDDLNKTNKKLIKELEDLLRKLEEIARR

SEQ ID NO: 22416 - protein, 59 aa, Artificial Sequence
  Synthetic
DEVRRKIDELEREIKEVVDRLRRRLEELLRRSKENVDRLNRENDRVLEEAKRKIRELEK

SEQ ID NO: 22417 - protein, 59 aa, Artificial Sequence
  Synthetic
SEVDEVADRLEKRLKENRDKNKRVEDEDKRLNKELNDTNRRMEEELKRLLTEIDDIRRK

SEQ ID NO: 22418 - protein, 59 aa, Artificial Sequence
  Synthetic
EEVRKKIDELERRLKEVIDDSKRRNDELERESRENVRELNRRNKELEDEARKEVERAKK

SEQ ID NO: 22419 - protein, 59 aa, Artificial Sequence
  Synthetic
SRVDEVIERLERLLRELDKINRDMIEDDKRLNTELNKENKEVEDRLRRLLEELEEIRKK

SEQ ID NO: 22420 - protein, 59 aa, Artificial Sequence
  Synthetic
KEALDKIRRLEERARRVIEELDEKNRRALERSKENVKRLDERNERLRKELEEKVRRLRK

SEQ ID NO: 22421 - protein, 58 aa, Artificial Sequence
  Synthetic
DVEEKVKKVIRELREVLKEIEERVRRVLERNKRSLEDLKRKHKESIDRAKEVLDEIRK

SEQ ID NO: 22422 - protein, 59 aa, Artificial Sequence
  Synthetic
EEALKRLEDKLREKLRDLRRKLDELRKENEKVNRDLEDKTRRVIEKLKRVITKLKEEVK

SEQ ID NO: 22423 - protein, 60 aa, Artificial Sequence
  Synthetic
SEIEEVEKRLEDVLRKVNKKTEDLMRSVKEIIKRSREHLEKVIRDLEEILKELRELRKRG

SEQ ID NO: 22424 - protein, 59 aa, Artificial Sequence
  Synthetic
EDVKRRIEEVEERLKRDNERNNKKIEDVNRDNRRVAEELRRRVEDVKRKIEKVLRELKK

SEQ ID NO: 22425 - protein, 59 aa, Artificial Sequence
  Synthetic
DVEELLDRVTKRVEKALRELRKKVRELKEENRKSVEELEETSKRLKKEVDDVERRLEAG

SEQ ID NO: 22426 - protein, 59 aa, Artificial Sequence
  Synthetic
REKLKKVLEEIEKILKEIEDKVRRVIEKSRRINEENKETNRRVIEDVRRLLKKAEEDLR

SEQ ID NO: 22427 - protein, 60 aa, Artificial Sequence
  Synthetic
RVEERLDEVRKKIDEVLKRLRDTTKELEDENEESLRKLKKEVDEVRKKIEEVLKRLEDAN

SEQ ID NO: 22428 - protein, 59 aa, Artificial Sequence
  Synthetic
EEKLEKVDREIEEILRRNKRTNEKVAEESRKINREAEERLRRVIEELEKILKEIEDRLK

SEQ ID NO: 22429 - protein, 60 aa, Artificial Sequence
  Synthetic
SVEKKLKDVEDEIRKVLRELEETSKKLDKEVDDMLKKLKDSTEEVKKEIDEMLKRLEERR

SEQ ID NO: 22430 - protein, 59 aa, Artificial Sequence
  Synthetic
DEKLDKVVKDLRKLLEDDKRTNKEVIDRVRRKLEENKETNEKVIKELRDILREIEERAR

SEQ ID NO: 22431 - protein, 60 aa, Artificial Sequence
  Synthetic
SEIEDVARRIRKLLEELRRRIRKIAEDSRRLNRRLEERNTEMEKEIKDRLRKLEEELKRK

SEQ ID NO: 22432 - protein, 59 aa, Artificial Sequence
  Synthetic
EEVKEKIDRLEKEIRDMLKELRERIKRLKDENEKSLEDLRRRNTELEEEVRRVIRELEK

SEQ ID NO: 22433 - protein, 60 aa, Artificial Sequence
  Synthetic
SELEKVAEDIRRLLKRNEEINREMIKRSRELNEELRERNREVTERIRRLLERLKEERKRT

SEQ ID NO: 22434 - protein, 59 aa, Artificial Sequence
  Synthetic
DELEKKLRDLEREIRKVLREAKRLNDELRKENKESLERLKRENDKLRKEVETVIREAEK

SEQ ID NO: 22435 - protein, 60 aa, Artificial Sequence
  Synthetic
DEIEEVIRRIKRLLDENRKKNEEMSDRSRKLNERLRKIIKKIIDEITELLKRLEDRARTV

SEQ ID NO: 22436 - protein, 59 aa, Artificial Sequence
  Synthetic
RKVDKKIEDLRKEIEDVLKELAERNKENKDRNKKSADELRKEIEDLERKVREVIRELTR

SEQ ID NO: 22437 - protein, 60 aa, Artificial Sequence
  Synthetic
RVEDEIRRLEEEARRVLRELEDLLRRLKKKNDESNKEIRERIERVRRKAEKVLRELERRG

SEQ ID NO: 22438 - protein, 59 aa, Artificial Sequence
  Synthetic
ERVIERLIRELRRLLEDVKRKAEDLIRKSEDLNEKWRKELKKLEREIERLLKEVADRVK

SEQ ID NO: 22439 - protein, 60 aa, Artificial Sequence
  Synthetic
EAEKELKRVEDRDKESNDRTKDILRRIEKEVRESNKRSKEILDEIRKRVRDVIEELRRKR

SEQ ID NO: 22440 - protein, 59 aa, Artificial Sequence
  Synthetic
EETVRRLKDELEEVNERTERAVRDLLRKARKVDDESRRRVEALLRKVEEVLREIKRRVD

SEQ ID NO: 22441 - protein, 60 aa, Artificial Sequence
  Synthetic
SFKETLDEIRKRVKEVLDKLEKILRDIARRVEKVNKENEDRLREINRRNEEVLRRLKKKG

SEQ ID NO: 22442 - protein, 59 aa, Artificial Sequence
  Synthetic
EDKLRELLERLERLLRELERRVEKIEEDLKRILDEVRKRTKELLERNERILEKLERDAD

SEQ ID NO: 22443 - protein, 60 aa, Artificial Sequence
  Synthetic
SIEDIVREIRERNKDAKRKVEDIVRRNREEIDKVLKRVEKILRDNEKRIREVKEELKERV

SEQ ID NO: 22444 - protein, 59 aa, Artificial Sequence
  Synthetic
EKDLDKVRKESEDNLREILRTLKEVHERSKETLKRIEDTLRRVHKKSEDELRRLREEVR

SEQ ID NO: 22445 - protein, 60 aa, Artificial Sequence
  Synthetic
SIEEIAKTIKEEIKEVMDRVREIVERDEREIKKVKEEVDRIAKRNEDEIRKVKDELDKKV

SEQ ID NO: 22446 - protein, 59 aa, Artificial Sequence
  Synthetic
EEAMKEVADRVRKKLEEIERTLEEVHRKSRKVLTEIIKKLKENHDRSKELLDRIREEVK

SEQ ID NO: 22447 - protein, 59 aa, Artificial Sequence
  Synthetic
SEVEEVLKEIKDLLRRLEEIVRRVLKENRRLLEEDVRRTEEILEELERLLDELRKDIKR

SEQ ID NO: 22448 - protein, 56 aa, Artificial Sequence
  Synthetic
EELLKRIEDEVRRVEDKLRKLIKRSKEESDKVAEELERLNREARKRIRDVMEELKR

SEQ ID NO: 22449 - protein, 60 aa, Artificial Sequence
  Synthetic
DEAEEILRRLKKLLEDAKRISDRTVEKNREMLKKIEEDSKRSLERNRELLKRIKELAKDI

SEQ ID NO: 22450 - protein, 56 aa, Artificial Sequence
  Synthetic
REIIERLKEEVDRLLKELRDSNRELKRESDEVVEKLRELNKRSKEEADKVEKDLRR

SEQ ID NO: 22451 - protein, 60 aa, Artificial Sequence
  Synthetic
SEVDEVLKRLRKDLDKVRKDSKKSLEELRRVLEEVERLSDESVKRLEEVLKRLEDLIKDI

SEQ ID NO: 22452 - protein, 56 aa, Artificial Sequence
  Synthetic
REIIKKLADEVREVLERLKELNRRLEKEARDAKRRLEESNDRLRRKVEEVIKELRR

SEQ ID NO: 22453 - protein, 60 aa, Artificial Sequence
  Synthetic
SEVEKLLDESRRVVEENRRANKKLAEESRKAVRRNREESKRLNEELREVVERARRKVTER

SEQ ID NO: 22454 - protein, 56 aa, Artificial Sequence
  Synthetic
EESLRRIKRTHEETEKESEKTLRDLEDEHRKTIEELERSLKELRDRIKKVLDELRK

SEQ ID NO: 22455 - protein, 56 aa, Artificial Sequence
  Synthetic
DEVEEVLKKARKDIERWREETRKVKEENKRNIDRIRKKLEEVLRDLKRAIDEIRKS

SEQ ID NO: 22456 - protein, 55 aa, Artificial Sequence
  Synthetic
REVLEEIRKLLRDIKETDRKVHEELERSNEKLRREIEKILRDLEDELRKLRRERE

SEQ ID NO: 22457 - protein, 57 aa, Artificial Sequence
  Synthetic
SEVEEVLRRAEKAIREWEEETRRAKEENEKNIKKVADDLRRLLEDARRTIEEIEKRR

SEQ ID NO: 22458 - protein, 55 aa, Artificial Sequence
  Synthetic
EEVLKEIKKLIDTARRKDEKVHKELEDTNRDLDRAIEEVIREIKKLLDDLREKAR

SEQ ID NO: 22459 - protein, 60 aa, Artificial Sequence
  Synthetic
SEKEDVLRRIKELLERLHEENREVLTRIEKLLKDNKERNDDVLRRITELLKEVTKRAKDR

SEQ ID NO: 22460 - protein, 56 aa, Artificial Sequence
  Synthetic
TEEVRKRVEDVVRKNKEVARELLDRVRKLSERNKRAIDKLLEEVKRVLEEVERALK

SEQ ID NO: 22461 - protein, 57 aa, Artificial Sequence
  Synthetic
DEERDVRREIRKLLRDAEEHSKKLNEESKKTNKRNEEENRKALEDNKRLLKEVEDRI

SEQ ID NO: 22462 - protein, 56 aa, Artificial Sequence
  Synthetic
VTELRERIKRLIEEIERLNREFKKKNEELSKKNKELVERSRTESKKLVDEARERAR

SEQ ID NO: 22463 - protein, 60 aa, Artificial Sequence
  Synthetic
DSEEEVRKRVKDLSEENKRLVKTAEKRVRELSKENKELVERLKREVDRIKKEIEELKRRG

SEQ ID NO: 22464 - protein, 55 aa, Artificial Sequence
  Synthetic
EKVLREIREIVKKNKRENEEVLRRIRELVKENNDENKRVLDEIEKLLKEIEDESR

SEQ ID NO: 22465 - protein, 61 aa, Artificial Sequence
  Synthetic
SEMDEVRKKLRELVERLKKEAERSRKSHREILKKVRDDLKRSEESHKELLDRLEEVLKRTV

SEQ ID NO: 22466 - protein, 59 aa, Artificial Sequence
  Synthetic
EDKLRRLLEEAAEVIKRLLDEVKRLNEHAKRMAEKILEDVKRLNKHAEDKVRDVEEKVK

SEQ ID NO: 22467 - protein, 61 aa, Artificial Sequence
  Synthetic
RELEEVARRLERLLDELRKKLRESERSVRRLLEELKKELEKLRKRHEDLLRTVKKKLDDTV

SEQ ID NO: 22468 - protein, 59 aa, Artificial Sequence
  Synthetic
EEELKRLLEEVEKAIRELLERVERLNRRLEEEIRRVLEDLERIIRHAEEDLRRIEEEVK

SEQ ID NO: 22469 - protein, 61 aa, Artificial Sequence
  Synthetic
RELEEVKKKLEKLAKDLRDTLERSARSVEELIKRLEDELRRSEESHKELLERLEDTLRKRA

SEQ ID NO: 22470 - protein, 59 aa, Artificial Sequence
  Synthetic
EEELRKLLKDATEEVRRIAEEVKKLNDELRRAVEEVLKEVRETNKHVREMIETVREEVE

SEQ ID NO: 22471 - protein, 61 aa, Artificial Sequence
  Synthetic
SELEEVAKRLKELVDDVRRALKESDDSHKELLKRLKEKLDEVRKRLKKLVDDLEETLKRTL

SEQ ID NO: 22472 - protein, 59 aa, Artificial Sequence
  Synthetic
EEELERLVREVERVIRKLKEDVKRLNDHAREKVKRVEEELRREEKRVRDEVERVKEEVR

SEQ ID NO: 22473 - protein, 61 aa, Artificial Sequence
  Synthetic
SELERVEDEARKLADDLRRMLEESRRSHEKILREVEEELKKSEESVRRILERVKEVLDRKL

SEQ ID NO: 22474 - protein, 59 aa, Artificial Sequence
  Synthetic
EDELRELLDRLRKAIKKLLDDVKRLNDHVKELIERIRDEVRRLNRRLEEEARDVERRVE

SEQ ID NO: 22475 - protein, 61 aa, Artificial Sequence
  Synthetic
DELETVREEIERLARELEKELKKSEDSVEKLLRELKERLKEVRKRHKELLDRLRDRLRKTV

SEQ ID NO: 22476 - protein, 59 aa, Artificial Sequence
  Synthetic
EEELRRLVEDVKRVVDEVLERVKELNKRLEEAIRRILEELKKIEKNVKDFIEDIDRRVK

SEQ ID NO: 22477 - protein, 61 aa, Artificial Sequence
  Synthetic
RELEEVKRRLEELLERLRKELERSDKSHKELAKKLRDELERVEREHERLLRELEDTLRKTL

SEQ ID NO: 22478 - protein, 59 aa, Artificial Sequence
  Synthetic
EKELTDLLREAKRRVEEVLKEVRDLNRNVKETVDRVLKELEDILRNVEEMIKEIKDKVR

SEQ ID NO: 22479 - protein, 56 aa, Artificial Sequence
  Synthetic
SDAEDILRKVEDLIRRLAEKHRDLLRRSKENAERIKREHDDHHRDIRRVIKEIEDN

SEQ ID NO: 22480 - protein, 55 aa, Artificial Sequence
  Synthetic
RELLKTVRDLLETLREINDRVREELRKIHEDVERRNKEVLDRNKKLLEELERKRR

SEQ ID NO: 22481 - protein, 58 aa, Artificial Sequence
  Synthetic
SELEDIERKLKELEDEDRELNRKLNDDTRRLDERNRRLNEELTKKLREVEEEAKELRK

SEQ ID NO: 22482 - protein, 55 aa, Artificial Sequence
  Synthetic
ERVREKIERIAKKLEDDNKESEDRHRRINEENRRRNDKNREDIERILRRLDEELR

SEQ ID NO: 22483 - protein, 58 aa, Artificial Sequence
  Synthetic
KELEEVDDEVRKEAEEVKRYIKESKEKLDRLRREDERLNDRVREKVEDVRRRVEERRS

SEQ ID NO: 22484 - protein, 55 aa, Artificial Sequence
  Synthetic
ERVKRKVDKIERELEDAIRRANEEHTKIEEDLRRRNKESKDEIRRILEELEERTR

SEQ ID NO: 22485 - protein, 60 aa, Artificial Sequence
  Synthetic
REIETVRREIEKILDDLRRTVKRIEDEVRKIHEDLRRSLEDSKRNIEEILKDLERAARRD

SEQ ID NO: 22486 - protein, 59 aa, Artificial Sequence
  Synthetic
KKDIDKLLKELRDLVEKIKKDLKELLERYEEIVRRIKELLKDLNREAEEVVRRLKEELR

SEQ ID NO: 22487 - protein, 60 aa, Artificial Sequence
  Synthetic
DEEERAEREIKKLLDDLRRTLEEVKEAIRRILEDNRRTTKRINDEDRKINDDLRRTLERR

SEQ ID NO: 22488 - protein, 56 aa, Artificial Sequence
  Synthetic
VDKVLKEVEETIDRVKKDIRRALREVEETSKEDKKRLREVLERSKDLARRLKEKLK

SEQ ID NO: 22489 - protein, 60 aa, Artificial Sequence
  Synthetic
SREEEAERRIEKLLRELEKTNRDIHEEIRKILERLRRTLKKVNDEDEKLNRDLEDTLRRR

SEQ ID NO: 22490 - protein, 56 aa, Artificial Sequence
  Synthetic
VEDVLRRVKEIIDRVKEEHKRMLEEVRKIAKDLEEKIRAVLEESKKLAEDIKRRLT

SEQ ID NO: 22491 - protein, 60 aa, Artificial Sequence
  Synthetic
REEEKAEEDIRRILRDLKETNRRIHEEIKKLLDDNERTLRRINEEDKKLNEDLRRTLEES

SEQ ID NO: 22492 - protein, 56 aa, Artificial Sequence
  Synthetic
VEEVLKTVEDIVRKVKREHEELLKEIEDLSRENKKDNERMLEESRRLARKLKEELR

SEQ ID NO: 22493 - protein, 60 aa, Artificial Sequence
  Synthetic
SEEEKMEEDIERLLDRLRRINKRLHDEHKKLNEDNERTVRRIDEEDKRINEDLERTLRES

SEQ ID NO: 22494 - protein, 56 aa, Artificial Sequence
  Synthetic
VRKVLEDVERIIRRLEEEHRRALEESRKRSEENKRENEEMLERSKELAERIKRRLK

SEQ ID NO: 22495 - protein, 60 aa, Artificial Sequence
  Synthetic
SEEEKAREDIKRLLEDLRRTNKKIHEDIEDILRELKETLKRVNDDDKRINDDLDRTLKER

SEQ ID NO: 22496 - protein, 56 aa, Artificial Sequence
  Synthetic
VEEVLRTVEKIIEDVKKEHEDLLKRVKDIVKKIKEEIEKVLRESEKLAREIKEELR

SEQ ID NO: 22497 - protein, 60 aa, Artificial Sequence
  Synthetic
SEEDELRKRVADILKRLREVNKRLHDEVKRLLKENRDALKEVKDKIRESNRELDEVLKRR

SEQ ID NO: 22498 - protein, 56 aa, Artificial Sequence
  Synthetic
VEEVLERLKEIVRKAEEEHKDVLRRLKEISDRHKRRLEEAERRNEKLLRDLKEELR

SEQ ID NO: 22499 - protein, 59 aa, Artificial Sequence
  Synthetic
SRLEEMLKRAEDLSRESEELLRRVLEEVKDLSRKHEEALREILKRVKDLVDTVRDLLRR

SEQ ID NO: 22500 - protein, 58 aa, Artificial Sequence
  Synthetic
EEVRKLEEELKRLLEENRRLAKELRDELRRLTKRNKDVVREVERRLEEIMKEIDKEVR

SEQ ID NO: 22501 - protein, 60 aa, Artificial Sequence
  Synthetic
SEDERIKKELRKVEREVDKLLKEHEKILEDLKREVDKLIETHRKILEELKRRVDELKRRG

SEQ ID NO: 22502 - protein, 55 aa, Artificial Sequence
  Synthetic
ERIRRELEEVLKDIRRKLKELKERNDKVNRDIEELLRELEERNTEVDKEIKKKAD

SEQ ID NO: 22503 - protein, 56 aa, Artificial Sequence
  Synthetic
DEEKEAEDLIEEHRRRSEEIARRADKLSEDHKRKVDEIAKTVEKLIRTLKEIVDRK

SEQ ID NO: 22504 - protein, 55 aa, Artificial Sequence
  Synthetic
KELKDRVERVLEESRELLERLRKKLEDNSKEVEDILRKLRKEVEDVVRKIRKRAE

SEQ ID NO: 22505 - protein, 56 aa, Artificial Sequence
  Synthetic
RDEDEVRKLITRHEKLSRDIAERLKRESKKHRDDVERIAKENEELNRRLREIVKKK

SEQ ID NO: 22506 - protein, 55 aa, Artificial Sequence
  Synthetic
KELKDDVRRVLKKSRDELKRLREELKRNSEEVERILKKLDEDNRRVLKEIRERLT

SEQ ID NO: 22507 - protein, 63 aa, Artificial Sequence
  Synthetic
DKEREVRRRVEELKKDSEDVLRRNREEVEKLHDENRKVNEESDRTAKELVEEAERMLREARKK

SEQ ID NO: 22508 - protein, 55 aa, Artificial Sequence
  Synthetic
EELLKELKKELDRLREENERSNRRLRKMLEELKRKNEEVNRELRKKLREIKERLR

SEQ ID NO: 22509 - protein, 57 aa, Artificial Sequence
  Synthetic
SEEERLERTVEEVEKALKKLADDLRRDMDRSRKSHEDLLDKLRKELDRVLEEIRKKT

SEQ ID NO: 22510 - protein, 55 aa, Artificial Sequence
  Synthetic
EEVEKRLRELLDEARREVERILKDLRELNEHVRRRVDEVRRRLEELLERLDRETR

SEQ ID NO: 22511 - protein, 56 aa, Artificial Sequence
  Synthetic
DEKREVEKELKRVDDEIKRLLRELEEALRRDKEEVDRLDKEVKDALDEVRERIERA

SEQ ID NO: 22512 - protein, 55 aa, Artificial Sequence
  Synthetic
EKVKEDLKRLLEEVEKAVRKVVEDSKRLHDEAKEAVDRNKEHLRRLLEDAKRRAK

SEQ ID NO: 22513 - protein, 56 aa, Artificial Sequence
  Synthetic
SEKERAEEEIERSKRNLERLLEEAKREIDRSRENLKRTLTKVEEVLRKIKEDLKRL

SEQ ID NO: 22514 - protein, 55 aa, Artificial Sequence
  Synthetic
EKLIRELRELNKRLAEEIKRLIDELRKLNKELDDEVEKIIRRAEDLLRDLERETR

SEQ ID NO: 22515 - protein, 57 aa, Artificial Sequence
  Synthetic
SEVEKVIRDLEEINKRLLEEIKRSIEENKRTNEEAERKVKEVIDRLRKLLEDLKRTN

SEQ ID NO: 22516 - protein, 59 aa, Artificial Sequence
  Synthetic
EDRLKRVEDVLRESVKNLKRLVDEVRKANRESNEHLKDLARKVEKVIREIEEEVDRTRT

SEQ ID NO: 22517 - protein, 59 aa, Artificial Sequence
  Synthetic
SELERLVEELRRALEKHKRRLEELKKELKKALDDHRREVKRLIDELKKTLDDVRKASRI

SEQ ID NO: 22518 - protein, 59 aa, Artificial Sequence
  Synthetic
ERLLEDVKRILDEVRREVEKLDTDADRRLREVKEEVERINREVEKTLRDVEEDLDRLKK

SEQ ID NO: 22519 - protein, 59 aa, Artificial Sequence
  Synthetic
SEVEKLKEDLKRALDEHRKRLEELKKELEDVLRRHEEKVRRLKEKLKRILDEIRRLSRI

SEQ ID NO: 22520 - protein, 59 aa, Artificial Sequence
  Synthetic
ERLLEDLDRALDEVRKEVEKLNRDAKRTLDKVREDVKRLDDDLRRTLKRVKEEIDKLTK

SEQ ID NO: 22521 - protein, 59 aa, Artificial Sequence
  Synthetic
DEIEELKKRLRKILEEHRKRVEDLKKENEDLNRRAEETLERLKRELEEMLREIAERSRI

SEQ ID NO: 22522 - protein, 59 aa, Artificial Sequence
  Synthetic
ERILEDLKRVIERVEREVRRLNKDLKRALDESRKRIEDWLKELDDVIKRVKREVEKIRT

SEQ ID NO: 22523 - protein, 59 aa, Artificial Sequence
  Synthetic
SEAEKLKKELEEVLERARRRLTELKEENKDANRRHRRRLEELKKRLEDVLKKVKDDADI

SEQ ID NO: 22524 - protein, 59 aa, Artificial Sequence
  Synthetic
ERILRRLEEVIRRVDRDIKELIKDAREVLERSKRDVERWNREMKKVLDEVRKRVEEIRT

SEQ ID NO: 22525 - protein, 56 aa, Artificial Sequence
  Synthetic
SEDEDAKRELRRVKEEVDKTLEDSKRVHDESRKRAREWLEDSKRVHREVKERLKEL

SEQ ID NO: 22526 - protein, 55 aa, Artificial Sequence
  Synthetic
EELKRELERVLEEHRRSLEKNKRDVERINEELKRRLDRNKEELRKILEDVERRRR

SEQ ID NO: 22527 - protein, 55 aa, Artificial Sequence
  Synthetic
SEEERLRREVKRVEDENRKLLERLREIAERVHRENKRLLDESRRIADKVRRDLDR

SEQ ID NO: 22528 - protein, 56 aa, Artificial Sequence
  Synthetic
LEEVLEELERVLKRLEEEHRRVVKELRDLLRRIKEDHDRLVEEAEEILREIDERAK

SEQ ID NO: 22529 - protein, 56 aa, Artificial Sequence
  Synthetic
SEEEEADKAIRTIAKAIEDLVRDLERALKESKRNIEELAKDLKRANDRIEEELEKA

SEQ ID NO: 22530 - protein, 55 aa, Artificial Sequence
  Synthetic
KELADRLRDLLRDAKRVVDRIKRALEELNKEAKKLVERAKKKHDDLLEDVKRDTK

SEQ ID NO: 22531 - protein, 56 aa, Artificial Sequence
  Synthetic
SEEEDAKRVLDEIREELKKLNDDVRRALKESKENIDRIIEDLDRTNKRIEEELDRL

SEQ ID NO: 22532 - protein, 55 aa, Artificial Sequence
  Synthetic
EELKERLKRLLERVREEVKRNKEHLERLNKKVKEDVDRLKKRHKDTLDEVDERRK

SEQ ID NO: 22533 - protein, 60 aa, Artificial Sequence
  Synthetic
KLDEDLEKVIKEVKERLKESLDRHKEVAKRLEEEVKRSEEEHRKVLEEAKRKLEEIKTKT

SEQ ID NO: 22534 - protein, 59 aa, Artificial Sequence
  Synthetic
DRTVRKVERELRDLIRRLEKRNEELIRRVKEIVERMEKTNRDLIRRIRELIKKVEDDVR

SEQ ID NO: 22535 - protein, 63 aa, Artificial Sequence
  Synthetic
SEEEKLKRVLDEFRRAVKELLEDLERANERAKDEVRRLLEDLDRAHERIRRAVEKLKERVKDK

SEQ ID NO: 22536 - protein, 55 aa, Artificial Sequence
  Synthetic
KDLEKRIRDTLREIKKRVEDVKRDNKRVLDELRKKIEENKKRNEDVLKEMEDKTE

SEQ ID NO: 22537 - protein, 60 aa, Artificial Sequence
  Synthetic
SDAERVKKESKDLLDTTKRLADRLKELLERLNKETRDRVREVIKEIERLVDEVEKEARKG

SEQ ID NO: 22538 - protein, 59 aa, Artificial Sequence
  Synthetic
EDIRTDLEDVLRRNKEALEEIRKDIERVNRKDREELREIARTLEKVLRDARRRLEELRR

SEQ ID NO: 22539 - protein, 59 aa, Artificial Sequence
  Synthetic
SIEDDLRRVLERSKRSLEELKRKADRVLEESKKNVRDLERELKRVLEKIKETIDKLRKD

SEQ ID NO: 22540 - protein, 59 aa, Artificial Sequence
  Synthetic
KEEVERLIRELDRVNEELAREVERLIRELEEVNRRVNEDLKRLIRELERALKELDERVR

SEQ ID NO: 22541 - protein, 57 aa, Artificial Sequence
  Synthetic
DEVDELIKRLEERNEELNRKAKRIIEKLKKENDDLNRKLDEIVRKAREDIEDAERRV

SEQ ID NO: 22542 - protein, 59 aa, Artificial Sequence
  Synthetic
KDLEDKLEEVLRRSKKNIEDVEKELRDVLRAAKKNLDDLRRKLEDVLRRLRDEIRRKKK

SEQ ID NO: 22543 - protein, 57 aa, Artificial Sequence
  Synthetic
SDVDRIITELRDINREVNRRVKRLIEELEELNRRLNEKAKRDMDEIRRLIEEAAKKL

SEQ ID NO: 22544 - protein, 59 aa, Artificial Sequence
  Synthetic
EDLKRKLEKVLKEARDNLEEVKKRLKEVLERSEENLRRLEEELRRVLEEVREMLKRKKD

SEQ ID NO: 22545 - protein, 57 aa, Artificial Sequence
  Synthetic
KDEEKIKRVLDDVERVLKENEDRNRELLKRVRERLEESRDHLRRVLEDVKRVLEELK

SEQ ID NO: 22546 - protein, 56 aa, Artificial Sequence
  Synthetic
VDELVKRIKDLLKRLNEISRRIAEEIKELLRTHDELNERVVRKLRDLLRKAREKRR

SEQ ID NO: 22547 - protein, 56 aa, Artificial Sequence
  Synthetic
SEEEKLKRVLEDVERDLRRNKRENEKSLEESKKVNDDNRRRNKEALDEVKKVLEDL

SEQ ID NO: 22548 - protein, 56 aa, Artificial Sequence
  Synthetic
DEELVDEIRKLLERLNEISERIHRRNKELDDELNEISKRIRERIEDLKRRAEERAR

SEQ ID NO: 22549 - protein, 60 aa, Artificial Sequence
  Synthetic
SEEDEIRRLLKENEDSTRRVEEDNKRLNDENEKSTKRVEDDIRRILERVRRELDDLRRRG

SEQ ID NO: 22550 - protein, 56 aa, Artificial Sequence
  Synthetic
REEIEREVREDNKRLEELLERSEREVREDNKRLDEALKKIEKEARELVKRMREKAK

SEQ ID NO: 22551 - protein, 59 aa, Artificial Sequence
  Synthetic
REEEEIRRLLKENEESTRKVEEDNKRLNDENRRSTEKVSRDLEDLNRDTRRVMEEAERR

SEQ ID NO: 22552 - protein, 56 aa, Artificial Sequence
  Synthetic
LEEIKREVEEDNERLKELLKRSEKEVREDNKRLRDVLEKSREEHERLKKRLEEAAK

SEQ ID NO: 22553 - protein, 60 aa, Artificial Sequence
  Synthetic
SEEDEIRKLLEKNEKSTEDVERENERLNDENRKSTEDVKREIDRLLKELREVLDEARKKG

SEQ ID NO: 22554 - protein, 56 aa, Artificial Sequence
  Synthetic
LDEIRKTVEEDDKRLKDALERSKREVDDDNRRLKKVLDEIRKTVRTMIEEIKKAEK

SEQ ID NO: 22555 - protein, 61 aa, Artificial Sequence
  Synthetic
SEKEKADDLRRKSKESNDTLRKRLDELKKRSEKNNEELERRLRALLKRLEDVLREITKRTG

SEQ ID NO: 22556 - protein, 55 aa, Artificial Sequence
  Synthetic
DELVKEVEDLNRELEEKVKRLIEEMEELNKRLNDKVKELIEEVERLIKELEDRVR

SEQ ID NO: 22557 - protein, 61 aa, Artificial Sequence
  Synthetic
KDIDELIKRSEDLTRDLERKNKEVVDKIEELLREHEKTNREVVKELRRLLDEVRERVERRG

SEQ ID NO: 22558 - protein, 59 aa, Artificial Sequence
  Synthetic
EDLERKVRKAEEDNKRAVERSKTHVDEVRKEVERVLRESKRHAEKLAEDVERMIRELER

SEQ ID NO: 22559 - protein, 57 aa, Artificial Sequence
  Synthetic
STLEKLKKDLDDIDRDLERILDELRRRVERIDEELRKIVERLHRRNKEIIERLRKAK

SEQ ID NO: 22560 - protein, 55 aa, Artificial Sequence
  Synthetic
REIREAEKKHKKVLDDLRRKLEEVEKRHREVEKELRDRLEESRREHEKVIREETE

SEQ ID NO: 22561 - protein, 56 aa, Artificial Sequence
  Synthetic
RELEELEKEVRKRLKEAEERVRDLAKKSRDLNRELKDRLRRIVEENRDVNRKVKEK

SEQ ID NO: 22562 - protein, 56 aa, Artificial Sequence
  Synthetic
DEDLRRVEEEIRRVIERLKRLLERVEEENRKSRKELRETLERLHRENEKSLREKET

SEQ ID NO: 22563 - protein, 60 aa, Artificial Sequence
  Synthetic
SLKERLDRVEEKIRKVLEELDRSTSRVEKKVEEVLRELKRSNDEVRKEIKKVLDELRKRG

SEQ ID NO: 22564 - protein, 57 aa, Artificial Sequence
  Synthetic
VVDEVAKRMTEELKKLDKENKEIEKEVDDILKRLKDEDKKTVDTLRKILKELDDDAR

SEQ ID NO: 22565 - protein, 60 aa, Artificial Sequence
  Synthetic
SEIEEVEKEMDKLAEESNKLNEEALRRVRKLLRDSNELVRELERRVRELIKRAKDLKREG

SEQ ID NO: 22566 - protein, 59 aa, Artificial Sequence
  Synthetic
EEVRRKIKEIKDRSEENIKRSRDSVREIKKESDENIKRLKRELERIKKRLEEVLRDLKR

SEQ ID NO: 22567 - protein, 59 aa, Artificial Sequence
  Synthetic
KDEEDLAREVKRVIDELEKLNEELNRAAEELIKRAEEINERVNRKVEKVERDLDKLKKR

SEQ ID NO: 22568 - protein, 55 aa, Artificial Sequence
  Synthetic
ETLRKLRDDLRKALKKSEDNIEDVRRRLEEVLERARRNLERVRRRLEEVLRKLKE

SEQ ID NO: 22569 - protein, 60 aa, Artificial Sequence
  Synthetic
SAAERLEKAVRDLIEELKRLNEELNKAVKEIIRRLRELNKKLNEDAERLIRKADELKRRG

SEQ ID NO: 22570 - protein, 56 aa, Artificial Sequence
  Synthetic
KEILDKLREELKRALEESEENLRRLRRELTEVLRESRENLERLKEEVERVLKRLAD

SEQ ID NO: 22571 - protein, 58 aa, Artificial Sequence
  Synthetic
SVVEDLEEKVKRLIERIERENRRLNKDADRLVRELDELNERLNRAIRRLIRKAEEARK

SEQ ID NO: 22572 - protein, 56 aa, Artificial Sequence
  Synthetic
ERELERLKRELEKVLRESEKNLEDLERKLKEVLDRSRENAKRLEDELREVLERLRK

SEQ ID NO: 22573 - protein, 58 aa, Artificial Sequence
  Synthetic
SVVEDLAKKVEELIRRLEELNKELNKRVRDLIEKLRDINRKLKREVERLIEEAEEVRR

SEQ ID NO: 22574 - protein, 56 aa, Artificial Sequence
  Synthetic
KDELKKLEERAREVLRKSEENLKRVEDELREVLRESEETLKRLEEELRRVLDELRK

SEQ ID NO: 22575 - protein, 60 aa, Artificial Sequence
  Synthetic
DEEKKAEDDIRRIHRRNEDLLRRHREITEEIEKRIRELLREHREITKRLERRLRELKKEG

SEQ ID NO: 22576 - protein, 55 aa, Artificial Sequence
  Synthetic
EELKRIKKRLDESLREVEEDLKRSEKRLRELLKRVKEDLDRSRKRLKEILDELRR

SEQ ID NO: 22577 - protein, 60 aa, Artificial Sequence
  Synthetic
DEVRKLEEDVERLRREVEEENRRLEEEVERLRKEVKERNRELNERVKTLIETAKRLKEAG

SEQ ID NO: 22578 - protein, 56 aa, Artificial Sequence
  Synthetic
EEMLRELEKRLKRLADETRRSNKELKERLERLKDESRDNNRELKERADRLLEKLKE

SEQ ID NO: 22579 - protein, 60 aa, Artificial Sequence
  Synthetic
SEEEELRKLERRLEELMKEYKEALDKLREEHEKTLREYEKRVEDLEREHKKVLKKLVDDR

SEQ ID NO: 22580 - protein, 56 aa, Artificial Sequence
  Synthetic
LDDLRRKVDKLRKEVEDHVRELEKKSRKLVEELKDHLRKLEEESRRLNRELEERSR

SEQ ID NO: 22581 - protein, 56 aa, Artificial Sequence
  Synthetic
SKEDLRRELDRVNEESKKHLDKLRKEAEEVLERLDRANKKIIEDAEEILRRIEKKV

SEQ ID NO: 22582 - protein, 56 aa, Artificial Sequence
  Synthetic
RERIKREIEENRKRNEEIARKIKEDIERARRDLERLRKKHEEELEKLKKRVEDADR

SEQ ID NO: 22583 - protein, 60 aa, Artificial Sequence
  Synthetic
DEDRIRKELEKAHKETREESEKLNRDVERVLREVRKASKDLNDKFEEELRKLREKVERDL

SEQ ID NO: 22584 - protein, 56 aa, Artificial Sequence
  Synthetic
RDKVEEDLRRSRKELEDYARDLEDAIRRIEDRLRRYARKLEEDIKRLARKLEERER

SEQ ID NO: 22585 - protein, 61 aa, Artificial Sequence
  Synthetic
SRTERVKEELKRLVEEYKKRSDDSRRRNEKLTRDYREDSRRVEEELKRIKEDVERELRRRD

SEQ ID NO: 22586 - protein, 59 aa, Artificial Sequence
  Synthetic
DEEAKKDLKRVRDALDRLTKRNEEKDKENEDRLRKMLRENRERLKEVRERAKRIKEELK

SEQ ID NO: 22587 - protein, 63 aa, Artificial Sequence
  Synthetic
KEKEEIRKALKELLDDLERTLERLKREYDKLRKDLEDTDERIAREHKKIADDLDRTLKEARKK

SEQ ID NO: 22588 - protein, 55 aa, Artificial Sequence
  Synthetic
ERVLEEVKREVDRIKEELRRTLEENRRRIEEIKKRLEDILRESRERARELKEKLR

SEQ ID NO: 22589 - protein, 56 aa, Artificial Sequence
  Synthetic
SEAETILRRVRRRVEEILDRIRRKLEESKREVEKHRRDVKKVLDDVRRTVKRIKER

SEQ ID NO: 22590 - protein, 55 aa, Artificial Sequence
  Synthetic
EEVDTRLKEISKELEETLRRVTEEHKRLNRELEEVDRRAEKEVRKILKELRDTTK

SEQ ID NO: 22591 - protein, 61 aa, Artificial Sequence
  Synthetic
SKEEELREVLRRIERELERVNEELREENKRIDKELEEVNRELEERNKRINDTVEDLVRERG

SEQ ID NO: 22592 - protein, 59 aa, Artificial Sequence
  Synthetic
REELRKIAEKLKKNLEEHKKRVREYLKRLEENLKRHRERVEKYARDLKRDLDRLRERLR

SEQ ID NO: 22593 - protein, 60 aa, Artificial Sequence
  Synthetic
SEEEKLEKKAREIEEALRRVNEELKRRNKEIDERLEEVNRRLEKDLKKIEEDARKLVKDK

SEQ ID NO: 22594 - protein, 59 aa, Artificial Sequence
  Synthetic
EDELREIIERLERNLERHKRRVDKYLRDLEKNMRDHKRKVDEVVKTLEETLRRLEEEVR

SEQ ID NO: 22595 - protein, 60 aa, Artificial Sequence
  Synthetic
SEEERLREKVKRVEDDLRRLNEEYKEKHKRSEERNKKLLKDLKEVHDRVKKAVEDILRDT

SEQ ID NO: 22596 - protein, 56 aa, Artificial Sequence
  Synthetic
EEEVEERIRRALKESREEIDRLERRNEEEDKKSEETVRRMMERNDRVLKEVEERAR

SEQ ID NO: 22597 - protein, 60 aa, Artificial Sequence
  Synthetic
REEEELRRLVKTVEDEVEKLLRRYRDESEKVKRTLEELNKDLERKHKEVLDRIRDILRKV

SEQ ID NO: 22598 - protein, 56 aa, Artificial Sequence
  Synthetic
REDVERELEETLRDVARKIERLLEKNKRDLDRSKKRVEEMVRRNEKALKDVEDEIR

SEQ ID NO: 22599 - protein, 60 aa, Artificial Sequence
  Synthetic
SEREDLKRTVDEVKKRLEELIDDYRKTSEEVERRLEELLRRLREDHKRVAETIDDILRRV

SEQ ID NO: 22600 - protein, 56 aa, Artificial Sequence
  Synthetic
TEEVKERIRRDLERVKRKIEELKKKNEEDLRRADKKVKDMLEENRRTLEKAKRKAD

SEQ ID NO: 22601 - protein, 60 aa, Artificial Sequence
  Synthetic
SKEDEARKEIKRIEDEIERLRKELEDAHRKLREDLKRLRDENKKVLEDIKRRLKELEKDT

SEQ ID NO: 22602 - protein, 55 aa, Artificial Sequence
  Synthetic
DRVRKKLEDELRRLKRTVDELKKRNEKALRDVKRDSERHKEELRRALRKAEEDAR

SEQ ID NO: 22603 - protein, 61 aa, Artificial Sequence
  Synthetic
SLKEELDKAIRELKERHKRINEDLERVVRESRKNHEDINRRLKKLLEELEKRVEEIVRREQ

SEQ ID NO: 22604 - protein, 59 aa, Artificial Sequence
  Synthetic
DRVIREIKKRLEDLLRRTEERAKEVKDENRKRNEDTREEVRRVEEELKELLRRIEERER

SEQ ID NO: 22605 - protein, 59 aa, Artificial Sequence
  Synthetic
DEVREIIRELKERIDKIAKEIDDENREHRERLKEIAREVKELIKENRKELKRIADERKD

SEQ ID NO: 22606 - protein, 59 aa, Artificial Sequence
  Synthetic
EEIRKRLDEATKRAEDELRKLKEKNKEVLKELDDRLRKLEDEHRRVREEVDKRLDELRK

SEQ ID NO: 22607 - protein, 60 aa, Artificial Sequence
  Synthetic
DEREKIEKRIRELLKEDKEHTRRNEEKIRRLLDTNRRLLEEIAKKIEEIARELKERKKEN

SEQ ID NO: 22608 - protein, 55 aa, Artificial Sequence
  Synthetic
EEIRKLVEDYRREHEKLKRRNDELLERYRRAHEEIKKRIDELVERLEEILRKLAE

SEQ ID NO: 22609 - protein, 60 aa, Artificial Sequence
  Synthetic
SEKETIEKRIRDKLKDDEDHTKRNEERIRRALKEDEDRLRKIEEEIRRTLEELEREKRSN

SEQ ID NO: 22610 - protein, 55 aa, Artificial Sequence
  Synthetic
EDIERLEERYRREHERLKRRNEDLSREYEERHERLKREIDKLEEDLKRETERAAR

SEQ ID NO: 22611 - protein, 60 aa, Artificial Sequence
  Synthetic
SEKEKIKKEIEDARREDEKHTEKNKRDIERDERRDEETLKEIEERIRRTLRELEKDRESN

SEQ ID NO: 22612 - protein, 55 aa, Artificial Sequence
  Synthetic
EDIERLEREYEKDHKRLKDENDDLTEKYRRRHREIDERIKDLERELDRRIKEIDR

SEQ ID NO: 22613 - protein, 61 aa, Artificial Sequence
  Synthetic
DVRDRVRELRRRLEEETKKVDDENRKIHEELKRVADESRKNNERLNRELRKEIRRVEKDLG

SEQ ID NO: 22614 - protein, 59 aa, Artificial Sequence
  Synthetic
EEALRRLEETLKEVKDELKTELDDSRREVEEVKRSNKEKNERSERRLKEVRDRLREERK

SEQ ID NO: 22615 - protein, 59 aa, Artificial Sequence
  Synthetic
SLEDSAREIEKRLRDLHRRYREDHERIREDLERLKTEYEKAHRDIKRELDRLREELERA

SEQ ID NO: 22616 - protein, 60 aa, Artificial Sequence
  Synthetic
EKEMLDRLEEHVDRNEKDIKKALDENRKRLDDIRRKIKKALDENREELKRIERRIRELKK

SEQ ID NO: 22617 - protein, 60 aa, Artificial Sequence
  Synthetic
SAEETTEDLKRRLKELDEKVKEVLKRNEDRVRELEEDVRRNLKKNEDDAREVEERLKTSG

SEQ ID NO: 22618 - protein, 59 aa, Artificial Sequence
  Synthetic
EELLKEVEDRVREIIKRIEEKLKRLNDRTREFIERIRRELRKVNEETKKMIKELKEEED

SEQ ID NO: 22619 - protein, 60 aa, Artificial Sequence
  Synthetic
SKAEKVLEKAREVVETIKRLVEEVLRHSEDVVRRITDLVRRLLEENERVVREIKRLADEG

SEQ ID NO: 22620 - protein, 55 aa, Artificial Sequence
  Synthetic
ERVIKKIEDLLKKVDDEAKKMLEEVERLNKEVNDRLKRVLEEAERLHEEVNRRVK

SEQ ID NO: 22621 - protein, 57 aa, Artificial Sequence
  Synthetic
KELEDVIEEVKKLLKTVNEESRRVAEEVRKLIREVSEELTEVIRRVERLVEEVATRV

SEQ ID NO: 22622 - protein, 56 aa, Artificial Sequence
  Synthetic
LDTVLRRAEDIVRKNRKLAEEVLRRVKKIVEENRKIAKEVLDDVRKLVEDVLRRAT

SEQ ID NO: 22623 - protein, 57 aa, Artificial Sequence
  Synthetic
EELERVIEEVRKLVEEAEKKSREVIKTVKELMDDVNRKSKKVLDDVRRLIEKVRREV

SEQ ID NO: 22624 - protein, 56 aa, Artificial Sequence
  Synthetic
ADDALRRVKEIVERNEEVVKELLKRAEDIVRTNEKLVKDVLDTVRKLVKKVKDDED

SEQ ID NO: 22625 - protein, 59 aa, Artificial Sequence
  Synthetic
SEAEDALRKAKRLADEDRKAAKRALEEAKKSAEEVKKAAKRALEEAKRIAEDVKRAADE

SEQ ID NO: 22626 - protein, 55 aa, Artificial Sequence
  Synthetic
EEAAREAKKLAKDAADVSRKAAKDAKDLSKEAADVARKAAEDARRLAEEAARKAK

SEQ ID NO: 22627 - protein, 60 aa, Artificial Sequence
  Synthetic
SDAEDVVRKVKRLVDELRRHSKELLKEVEDLVRDLVRHSEEVVKRVEDLVRRLEELVRRG

SEQ ID NO: 22628 - protein, 59 aa, Artificial Sequence
  Synthetic
EEVRRVLREIREVLKKVAEDSRKVNEDIRRVLEEAKKTSDKVNTDSEEVLRTVARRFED

SEQ ID NO: 22629 - protein, 60 aa, Artificial Sequence
  Synthetic
SRAERLLEDVRRLLEESLRNSERVLEEVRKLIEENLRHSRKVVDEVRRLLEEVLRVVERG

SEQ ID NO: 22630 - protein, 59 aa, Artificial Sequence
  Synthetic
EDVRRVLEAIKEDLKRVEDANREINRRSEELLREAEKRSRDIDKESRDLVRKVKKDLEK

SEQ ID NO: 22631 - protein, 60 aa, Artificial Sequence
  Synthetic
SRAEEVLKDVKRLVDENRRHSERVVEEVRKLVTENKRHSERVVEEVRRLVEELERARRRG

SEQ ID NO: 22632 - protein, 59 aa, Artificial Sequence
  Synthetic
KDVRKVLKDIREVLERVEEDSERVNRESKKVLDDVKKESDEADDESRRVLEEVDRKARK

SEQ ID NO: 22633 - protein, 60 aa, Artificial Sequence
  Synthetic
DRVEELLKTVEKLVRDNEKHSRDVVKEVRRLAEENERHSERVVREVRRLVKELEDMKRRG

SEQ ID NO: 22634 - protein, 59 aa, Artificial Sequence
  Synthetic
REVREVLKRIEEILKDVKRKSEEVNRESERVLREVEKRSEDADRESKKVLDDVKEKARR

SEQ ID NO: 22635 - protein, 60 aa, Artificial Sequence
  Synthetic
SEEEVLKEIDEVSRDLERKNKTINEEIKKVSDRVAEEVRRVLEDIKRTSKDAVDDVRTRG

SEQ ID NO: 22636 - protein, 56 aa, Artificial Sequence
  Synthetic
LEKVVREVEESVKESEERSRRLLEEVRRSVKKLEEDVTRLLEENKKSVDDIKERAR

SEQ ID NO: 22637 - protein, 60 aa, Artificial Sequence
  Synthetic
REEEVLEEIRRVVEEVRRENERINKEIRERSEDLRRKVKRILEKAKKVLDDVDERAKREG

SEQ ID NO: 22638 - protein, 56 aa, Artificial Sequence
  Synthetic
VDEVLKEVEDLVRESVRLSEDLLREVRESVERLVDEARKLVREIERLVKEAVDTVR

SEQ ID NO: 22639 - protein, 60 aa, Artificial Sequence
  Synthetic
KEEEVLKEAEEVSRRAEEKNRRINDEVRRVVRRVEETVTRVLEDVERTSKEAKERVERAG

SEQ ID NO: 22640 - protein, 56 aa, Artificial Sequence
  Synthetic
LDTVVEEIKDSVRKSVERSRELLERVERIVTELEKRVDELVRENEDSVRRIDERVR

SEQ ID NO: 22641 - protein, 60 aa, Artificial Sequence
  Synthetic
SEAEKIVEEAKRLADKARELAERSVRHSEKLARDSEKAAREAVKEAKDLADKARDLAAKR

SEQ ID NO: 22642 - protein, 56 aa, Artificial Sequence
  Synthetic
KEALDTARKILRDAEEAAKEAHKEANRLNKEAEEAAKRAADEARKILKKAEEDARR

SEQ ID NO: 22643 - protein, 60 aa, Artificial Sequence
  Synthetic
DDLEEIVKRVRRIVEEIRRLVEELVRRDKRIVDEIKRLLEEDKRKVDEIVKEIEEVVRRG

SEQ ID NO: 22644 - protein, 59 aa, Artificial Sequence
  Synthetic
EEVRRVLKEVKDILKTVRDEVEEANEDAKRLNEEVREEAERVLRDTKRILDEVRKEADK

SEQ ID NO: 22645 - protein, 59 aa, Artificial Sequence
  Synthetic
REKEVLEEVRDIVRRASERSKEALDESREILKTVDDEVRRVLEDSRRLLEEVRKRVEDN

SEQ ID NO: 22646 - protein, 56 aa, Artificial Sequence
  Synthetic
AREIVERVRRLVDTSRRLVEEDVRRVREVVKELRKLLREDVKRVRDVVEELAKEAT

SEQ ID NO: 22647 - protein, 57 aa, Artificial Sequence
  Synthetic
SEMEDAKRKIEDLVRRVKDSLRDAERRIREVVERVERSLKEVEDRSRELLEDVKREG

SEQ ID NO: 22648 - protein, 59 aa, Artificial Sequence
  Synthetic
DESVRDAVREVEDLIRRLTEDNKRLVEEVKRLVDRASEENKKLNDTSKKVVDEIREREK

SEQ ID NO: 22649 - protein, 57 aa, Artificial Sequence
  Synthetic
EELERVKEEIDKLVKEVRRSLKDVERRSAELLKEVEKSLEEVERESKKVLDEVRKAG

SEQ ID NO: 22650 - protein, 59 aa, Artificial Sequence
  Synthetic
DKAVKTLLEDVRRLVREATEDNKRVNDESRELVERASRDNRRVNKESRDIVRRLEERTK

SEQ ID NO: 22651 - protein, 57 aa, Artificial Sequence
  Synthetic
SELEEVERRVEKVVKEVRDSLKKVKEDIEKVLRESHKRLRDVEREVRRVLEKVRRRG

SEQ ID NO: 22652 - protein, 59 aa, Artificial Sequence
  Synthetic
DKTVRDVLRRVRKLVEDATRANEKALDDVRKLVEKSRKLVEDVLERVRRLVKELEERTT

SEQ ID NO: 22653 - protein, 59 aa, Artificial Sequence
  Synthetic
DEVEDVVRKVRDLVRRVREAVRRLLEENRDLVRKLIEDSERLVREVEKLIKEVEDTVKD

SEQ ID NO: 22654 - protein, 59 aa, Artificial Sequence
  Synthetic
REELERVIKEIKDVVREVTKVVEKVIREAEKLNEDVNRRSEEVNKRIKKLVEDVARRVE

SEQ ID NO: 22655 - protein, 56 aa, Artificial Sequence
  Synthetic
DEAEEVKKLIDKVLREVEEVVRRVNKRDKDLLREVEKVVRDVNREDKRVLEEVERS

SEQ ID NO: 22656 - protein, 55 aa, Artificial Sequence
  Synthetic
EEIVREIEKVAEDIMRRNEELVKESEDVVRKIVRDNERLAEDSKRVVEEAVRREK

SEQ ID NO: 22657 - protein, 61 aa, Artificial Sequence
  Synthetic
SAIDRVRKTLEKLVERLERVLEESSKAVEDVKEKVERLLRELRERTKRIVDEVEDMVRKAN

SEQ ID NO: 22658 - protein, 59 aa, Artificial Sequence
  Synthetic
EEELDRLVKKVEDLVRRLEELARKSLKDIKKLLKDIEDRLRKSVEKSRRLAEEIKERLR

SEQ ID NO: 22659 - protein, 60 aa, Artificial Sequence
  Synthetic
DKADEAVKRVKDLIDDLKRRIDEVVKRSREVVRDIEKHAEDVVKESRRVVDEIKKLVTRG

SEQ ID NO: 22660 - protein, 55 aa, Artificial Sequence
  Synthetic
EEVEERVREVLRRVEKRVKEVNEESERTIRELERVSRRVNEESRRSIEEAKRAAD

SEQ ID NO: 22661 - protein, 61 aa, Artificial Sequence
  Synthetic
DAVERAKEESKRVLEDAERVVRRVEEEVRKMERKAEESLKDVRRKSEEVIRKVEEVVRRKG

SEQ ID NO: 22662 - protein, 59 aa, Artificial Sequence
  Synthetic
DKEVREVVEDSRRSVRRVEELVEKVVRDVKKLIEDHERRNRESVRESERSIKELEEKVR

SEQ ID NO: 22663 - protein, 59 aa, Artificial Sequence
  Synthetic
DDLERVLREVKRLVEENEKKVRRIVEESRELVERNKELLRRVVEEVRRLVKEVRDILRN

SEQ ID NO: 22664 - protein, 59 aa, Artificial Sequence
  Synthetic
EDKLREVRERIKRLLDRSHEAVRRASEKSKRSLEESHRAVREVEKRLKELLEDVREDVR

SEQ ID NO: 22665 - protein, 59 aa, Artificial Sequence
  Synthetic
DRLEEVVERVERLVRENVKRLEKVAEENRELVERNKRRLEEIVRRVRELIERAKRIVRD

SEQ ID NO: 22666 - protein, 59 aa, Artificial Sequence
  Synthetic
EDKLRDVERRAKELLEESHRVIRTVEERSKTVLADSHRVIEDVRRRLEELLREVAEEVR

SEQ ID NO: 22667 - protein, 60 aa, Artificial Sequence
  Synthetic
DEADEVVKEVEDRVRKLVRRLEESAKKSKELVERILKRVEDSVRRSEELVERIKREVERR

SEQ ID NO: 22668 - protein, 55 aa, Artificial Sequence
  Synthetic
EKVEEMLRRVLEEVRRAVRKSSEDNKRSVEEVKRVLEKAEEDNRRVVEEVDRELK

SEQ ID NO: 22669 - protein, 60 aa, Artificial Sequence
  Synthetic
SKLEEVEKMVRKVIEDSRRVNEEVNRRSEEVVRELEKVHREVNDASRRVVEKARRVLKEG

SEQ ID NO: 22670 - protein, 58 aa, Artificial Sequence
  Synthetic
KEADEVVERAERISEENKRRVEDVARKSKELVEDVRRHSEEVVRRVEELVKEVEERVR

SEQ ID NO: 22671 - protein, 60 aa, Artificial Sequence
  Synthetic
SLLEDVKRTVREVVRESRRVHKEVNDDSRRVLKRSDEAHERVNRDSRRVIERIREVLSRG

SEQ ID NO: 22672 - protein, 58 aa, Artificial Sequence
  Synthetic
EEVRELAEDARRISEDNRRNSKRVVDRVREISKENEDNSRRVVDRVRKLAEEVEREVR

SEQ ID NO: 22673 - protein, 60 aa, Artificial Sequence
  Synthetic
DDLERVKETVKKVIKRSRDSTKKVADTLREVVRESERVHREVNETSRRVEEEAKRVASRG

SEQ ID NO: 22674 - protein, 58 aa, Artificial Sequence
  Synthetic
EEVDKLADRARRLVAKSEEDNKRVMKEVTDISKENEDNSRRVVDEVRKLVEEVRRRLE

SEQ ID NO: 22675 - protein, 60 aa, Artificial Sequence
  Synthetic
DKVERVVEEIRDLMRRVEELIKKAADDNRKLVKEVEDLIRDAVRDSERLVAEVEKLLTKE

SEQ ID NO: 22676 - protein, 55 aa, Artificial Sequence
  Synthetic
DEVRKEVKRVIKAVEKVIEDVERTSEEARRRVEKVIKEVEEKNREVIKRVEDRIR

SEQ ID NO: 22677 - protein, 60 aa, Artificial Sequence
  Synthetic
SEADKLVEEVKDVVREDKRRVKEIVETVRELVRRSRETVRRIVETVEEVVRRLLELLRKG

SEQ ID NO: 22678 - protein, 55 aa, Artificial Sequence
  Synthetic
EKVEEVLRRVKRESEKVIEDVERELKRVEDDDRRVIEEVKKRLKRVLERVRTESK

SEQ ID NO: 22679 - protein, 59 aa, Artificial Sequence
  Synthetic
READELVDRVKKVVEEDKRLSKELVDEIERVVDELEKVSRELVERVRDLVRRLLEVAAK

SEQ ID NO: 22680 - protein, 55 aa, Artificial Sequence
  Synthetic
DKVEKVLKRVEEESREASERNERVIERVERRVDEASKRNEDEIDKVRKEVERVAT

SEQ ID NO: 22681 - protein, 59 aa, Artificial Sequence
  Synthetic
EEVKELVERVRRVVDDLRKKLEKIVEEVRDVVRKDEERSRKLVEDVKDLVRKILEVLRK

SEQ ID NO: 22682 - protein, 55 aa, Artificial Sequence
  Synthetic
DDLRRVLKEVDEEVRKVIEDVARVLEEVKRRSDRASRENEEVIKRVTEEVKRVVK

SEQ ID NO: 22683 - protein, 60 aa, Artificial Sequence
  Synthetic
DRVEKLVEEVKRHVTEVLKTVEDLARRIRDHVRKVEDTSRELVKEIKRLVEEILDRVRKK

SEQ ID NO: 22684 - protein, 59 aa, Artificial Sequence
  Synthetic
EDVVRELRRVLRESNEKLKEVVDRLRKVLEESTKRVEDASRRVERVLEKVEEDVKREAT

SEQ ID NO: 22685 - protein, 60 aa, Artificial Sequence
  Synthetic
SEVEELKERIREIVERIEETVRRLAKRVEDHVREVEKDSKRLADEIRDFVRRITDEVRKK

SEQ ID NO: 22686 - protein, 59 aa, Artificial Sequence
  Synthetic
KRLVDKLRKVLEEVREEVERVVRELEEVLRRSTKRVEDASRELERVLKEVKETLEREVR

SEQ ID NO: 22687 - protein, 60 aa, Artificial Sequence
  Synthetic
DRVEALVDEVKRHVTELLKTAERLADEVREHVDDVRKKSKELVDEIRRVVEKILDEVRKK

SEQ ID NO: 22688 - protein, 59 aa, Artificial Sequence
  Synthetic
EEVVRELRRVLRESNEELKKVVTELEERLKDSNEEVKKASAEVRKVLEEVRADVDREVK

SEQ ID NO: 22689 - protein, 57 aa, Artificial Sequence
  Synthetic
SLVEKLRRVLEEVRRTSEKVIRDVKEVNKRSEDKTREIVRRLEEVNKESKERLDRAG

SEQ ID NO: 22690 - protein, 59 aa, Artificial Sequence
  Synthetic
KELAEKLAREVKRLVDESKKNMDKSVEDSRRLVRESEENVRKSVEDSRRLVKRAVEETK

SEQ ID NO: 22691 - protein, 60 aa, Artificial Sequence
  Synthetic
RVDEDLRRVLKEVKERNEEVVRRSKEETDRVEEDIERVIRDSERVSEEVKRRVDKAKKDV

SEQ ID NO: 22692 - protein, 59 aa, Artificial Sequence
  Synthetic
EELAKEVVKRVRELVDRSRRLMTESVRKVRELVEDIRRRVRESVEKLRRLVEEIERRIR

SEQ ID NO: 22693 - protein, 60 aa, Artificial Sequence
  Synthetic
KEVEKLVKDVERMVEESLKENERLVKKSDELVKESEKRNKELAERSRRLVKEITDRLAEE

SEQ ID NO: 22694 - protein, 59 aa, Artificial Sequence
  Synthetic
EDVLRDLRRVVEEVTEKIKEVNRRSEEANKRSKDRIEEVNRRSEKVNEDVEREIERALR

SEQ ID NO: 22695 - protein, 60 aa, Artificial Sequence
  Synthetic
DELEKAVERVKDIVRKSLELLKRLADRVRDIVREILDEVRRNVEEVRRIVKEIVEEVRRR

SEQ ID NO: 22696 - protein, 59 aa, Artificial Sequence
  Synthetic
EEALKRLERVVREVAEESDRANKELDRVVEEVKERVERVLRESNKVVKEVEDRVREETR

SEQ ID NO: 22697 - protein, 57 aa, Artificial Sequence
  Synthetic
SVKETVEEEVRRVSDEDRRINRDVERVSEESNRRLDKVHKELEEVVKEVLKELDDTG

SEQ ID NO: 22698 - protein, 59 aa, Artificial Sequence
  Synthetic
EETARRVVEEARRIVAESKELVKEVVRRSDELVRDVEKHSRDVAKTVRKIVTDVARRTR

SEQ ID NO: 22699 - protein, 57 aa, Artificial Sequence
  Synthetic
SAEETLEKVIRDVEEEDKKAHEDSRRVIETVKEEIDRVHKDSKRKIDEVKERIRREV

SEQ ID NO: 22700 - protein, 60 aa, Artificial Sequence
  Synthetic
LEERVRRIVKEVREIVKRSKERSDEIVKEVKRIVKEALDLSREIVERVERIVREVVERAR

SEQ ID NO: 22701 - protein, 57 aa, Artificial Sequence
  Synthetic
EADERLRKRLKEVNERDKKAHEDSKRAIDRVREEDKRVLDTVREEIKRVKDEIRRAL

SEQ ID NO: 22702 - protein, 60 aa, Artificial Sequence
  Synthetic
LERLVREVVRENEELVTRSEELSRRIVEEVKRIVDESRKRAKEIVDEVRKRVKELVDTDK

SEQ ID NO: 22703 - protein, 57 aa, Artificial Sequence
  Synthetic
DVREKLEKVLREVERRVEKASRESKETLDRVRKRLKDVSDESKRELERVKKRVDDAD

SEQ ID NO: 22704 - protein, 59 aa, Artificial Sequence
  Synthetic
KKVIEELVEEVRRLVTEHERLSRELVDRVEKLVARHEELSKKLVTDAERIVKEVEERAK

SEQ ID NO: 22705 - protein, 57 aa, Artificial Sequence
  Synthetic
SALERLREVLERVLRRVKKVTDDARRVNERVNRKVDRVSEDSERELRRVLKRVREAS

SEQ ID NO: 22706 - protein, 59 aa, Artificial Sequence
  Synthetic
EEVLRELVERAKKLVDDHLELVERLVRESEKLVEDHLRRSKKIVEDVKRIVEDVERRVK

SEQ ID NO: 22707 - protein, 60 aa, Artificial Sequence
  Synthetic
DEVDKARKEVDRVVKESRKLVEKNVREVEEVVKTVEKLVEDVIRRVEDVVREVKELVTRG

SEQ ID NO: 22708 - protein, 59 aa, Artificial Sequence
  Synthetic
EELLDRVRKVVEDVSRKSKKALDESHEVVKRVKDRADEVLDKVRRAVEEVERRIETEAR

SEQ ID NO: 22709 - protein, 60 aa, Artificial Sequence
  Synthetic
DEVEKAVKEVERVVREVKELVDRNIDEVRKVVEDSKRLIDELVEDAKRVVKRVKELRDRG

SEQ ID NO: 22710 - protein, 59 aa, Artificial Sequence
  Synthetic
EELLDRVRRVVEEVKKEADRLLEESHRVVREVSERSKRALEEVKRVVDEVTERIKKDKD

SEQ ID NO: 22711 - protein, 57 aa, Artificial Sequence
  Synthetic
STKEKLDDVLRRVEEKAREVVEDNRRADRDVHRKARKVVEELRRVDEEVHETVKRVD

SEQ ID NO: 22712 - protein, 56 aa, Artificial Sequence
  Synthetic
VDEVVDRLRRLVEEVLRHSKKNSRESDEMVRRVTEEVREVVKESKERVDDVLKRVE

SEQ ID NO: 22713 - protein, 60 aa, Artificial Sequence
  Synthetic
KKVEEIMERLRRVAKEIKERVDRLVEKNRKSAKDLLDTIEDIVRKNRDLAEKIKDLARRR

SEQ ID NO: 22714 - protein, 56 aa, Artificial Sequence
  Synthetic
KEKLRRVLREVEEVVRRVKKKLDDSVRELREIIRRAERELREVDEEVRKVVEDVKR

SEQ ID NO: 22715 - protein, 59 aa, Artificial Sequence
  Synthetic
RVREELKKVEEEVREVVRRAKEKTRRVLEEMRKVVKDVDDESKRVVDEVKKVLEEVRAR

SEQ ID NO: 22716 - protein, 59 aa, Artificial Sequence
  Synthetic
EEVVKKVVDDIRKLAKDMDDHSKEVVDRIREVARRIEELNRELVRDLKDEVRRVKEKAK

SEQ ID NO: 22717 - protein, 59 aa, Artificial Sequence
  Synthetic
SVRETLKTVEEEVKRVIDRARKRDERVVREVERVLRDAMRKDEDVNRDVERVLRDVVRR

SEQ ID NO: 22718 - protein, 59 aa, Artificial Sequence
  Synthetic
KDVFKRVVEELRRLVKRVEELVTRTVEEIDRIAKEVTRHSEETVRRLKKLVKTVTDEAN

SEQ ID NO: 22719 - protein, 59 aa, Artificial Sequence
  Synthetic
SSVREVVKEARDIAKENLERVKKTVKENRDLARKVAEDVKKSVEELRKLAEDVEEIARK

SEQ ID NO: 22720 - protein, 59 aa, Artificial Sequence
  Synthetic
EELEKELRTVVREVEEVLRRSEEDDRRVHKEAEDVIKKVEEDDKEVVDRVKKVIRDVRT

SEQ ID NO: 22721 - protein, 59 aa, Artificial Sequence
  Synthetic
SEVEKIVKEAEDLVREVKRRVEDTVRKNRELADRVRKEVDKSVRELRELVKRVLDIAKD

SEQ ID NO: 22722 - protein, 59 aa, Artificial Sequence
  Synthetic
EELRRELERVIKKVEEVIRKAEEDDRTVHRELNKIIKDVEDKDRTVVEEVERVIEEAER

SEQ ID NO: 22723 - protein, 59 aa, Artificial Sequence
  Synthetic
SEVDEVVERARRIAKENLDRVKKIVRENRELVEKVRKDVEDSVRTLKKLVDDVTEIARK

SEQ ID NO: 22724 - protein, 59 aa, Artificial Sequence
  Synthetic
DDMRRKLETVVKEVEDILRRSREEIRTVNEEVEKVIEEAEREDERVVREVEEVIKRVEK

SEQ ID NO: 22725 - protein, 59 aa, Artificial Sequence
  Synthetic
SSVEDVVRKMRKIVEDNKREVEKIVRENRKMAKDNEDLVKESVKDLKRLAKELEDLAKD

SEQ ID NO: 22726 - protein, 59 aa, Artificial Sequence
  Synthetic
EDLERTLRTVVKEVKEVLDRSRDLVRRVNEEVKRVLDRSREEDERVVREVEEVIRRVET

SEQ ID NO: 22727 - protein, 59 aa, Artificial Sequence
  Synthetic
REVDEIVDRLRRIAKENKDRVRELVERNRKLAEEVRRRVEESVKRLRDLVRTIEELARR

SEQ ID NO: 22728 - protein, 59 aa, Artificial Sequence
  Synthetic
EDLERKIREVVREAEEVLRESKREMDTVNKEVREVIEDVRKRDEDVIREVEKVIREVEQ

SEQ ID NO: 22729 - protein, 59 aa, Artificial Sequence
  Synthetic
SEVDEIVKEIREIARKNKEDVRRTVEDLRRLVKEVEKRVEDSVRTMRDLVRRLEETARR

SEQ ID NO: 22730 - protein, 59 aa, Artificial Sequence
  Synthetic
EELERKLKTVIDEAEKVLRESEEDDRRVVEEVERVIKKVEEEDRKAVREVEKVLEDVRK

SEQ ID NO: 22731 - protein, 60 aa, Artificial Sequence
  Synthetic
REVDELLKRIKEVADDIKRLSDENVKEIEKLAREVEKLVRDVVRENEEVAKEIEDLARRR

SEQ ID NO: 22732 - protein, 56 aa, Artificial Sequence
  Synthetic
KKKLRDVLRELEKVVRDVAKEDEDANRRLKEVAERVKREIDEVDKKLKKVLDDVRK

SEQ ID NO: 22733 - protein, 60 aa, Artificial Sequence
  Synthetic
REEEKLRKVLEDAKKVSKEVNEEDDRVNKEVEDVLREVKKEIDEVLKRATETVERVKREN

SEQ ID NO: 22734 - protein, 56 aa, Artificial Sequence
  Synthetic
VDEIVKRIKELVDRSRKLSEENVRRLKKIVKRVKERVKELLDRIKEMAKEIEDRVR

SEQ ID NO: 22735 - protein, 60 aa, Artificial Sequence
  Synthetic
DEEKKLKEVLDRATKVVKDVAEELDRVLEDVERVSRDVNRRDEKVNRDADRVLREVKDEN

SEQ ID NO: 22736 - protein, 56 aa, Artificial Sequence
  Synthetic
VEEIVRRIEEVAKTLREIVRRVLEELKEVVKESERLSRENVRRIEKLAEEIRRRVK

SEQ ID NO: 22737 - protein, 60 aa, Artificial Sequence
  Synthetic
DEDEKLRKVLEELRRVVEEVKRRSDKALEDAERVLRRVKKEDRDANKKAEDELRRVIDEN

SEQ ID NO: 22738 - protein, 56 aa, Artificial Sequence
  Synthetic
VDEILKRIEELMKEIRKLVKEDVDRIRDLVRRIDEESKENVKEIERVADEIRERIR

SEQ ID NO: 22739 - protein, 60 aa, Artificial Sequence
  Synthetic
KEVEDVLREVEKVVEKIKRDVEKIVKDSKELAKRVEELVKESEDRSKEIVDRVEKLRREG

SEQ ID NO: 22740 - protein, 56 aa, Artificial Sequence
  Synthetic
EEKVEKVLRKVRDVVRRVKEKVEEVHRRSREMLKRVEDRDREAHERSRKVAEDVKR

SEQ ID NO: 22741 - protein, 60 aa, Artificial Sequence
  Synthetic
SEVDEVLETIERIVREVKKLVKRSVEESERLVDEVEKLVEKSVREIKEIVDRIRDMKTKG

SEQ ID NO: 22742 - protein, 55 aa, Artificial Sequence
  Synthetic
EKVERVLEEARRVIEEVEREDDDAHRKSKEVLKRVLEKDRKALEDAKKVVEEVKR

SEQ ID NO: 22743 - protein, 59 aa, Artificial Sequence
  Synthetic
KEVEDLERRNKELVERVDKLSRENVERNKKLAKELKEISEENVRRNRKLAEELKEVADR

SEQ ID NO: 22744 - protein, 59 aa, Artificial Sequence
  Synthetic
EDLRRRVKKSHDEVERELRRVDREDETSHEELRRVLEKVKREDRKSHEEVKRRLDEVRR

SEQ ID NO: 22745 - protein, 59 aa, Artificial Sequence
  Synthetic
SEVDEIVKRNDDLAKEVKRLSTENVKRNKELADRVKRLSTENVKTNEKLAKDLERVVRR

SEQ ID NO: 22746 - protein, 59 aa, Artificial Sequence
  Synthetic
ERLRRKVEKSHRDLREVLERVRREDERSHEEANKVLEDVKREDEKSHRDVKKRLDDVRR

SEQ ID NO: 22747 - protein, 60 aa, Artificial Sequence
  Synthetic
SEVDRLLEKLEELVRKVRRDVEENVKKNDELAKEVERLSKRNVERNEELAKEIEDLARRG

SEQ ID NO: 22748 - protein, 59 aa, Artificial Sequence
  Synthetic
EELKEKVKRVMEKVKRVLDRVREEDEKSHRKADRVLREVEKRDRDSHERLRKVLDDVRR

SEQ ID NO: 22749 - protein, 59 aa, Artificial Sequence
  Synthetic
DEVREIVERNERLAREDKKIAEENVRRNEDLVRRLRELSRKNVEDNRRLAKELEEVAAR

SEQ ID NO: 22750 - protein, 59 aa, Artificial Sequence
  Synthetic
EELKKRVKDSHDKLREVSKRSEELDRKSHEDLKEVLKEVRERDDRSHEELRRVLEEVKR

SEQ ID NO: 22751 - protein, 60 aa, Artificial Sequence
  Synthetic
DEVERILERIDELVKRVKELSRRNVERNKELVERVDRLVKDNVDRNRRLAEEVDRLKKEG

SEQ ID NO: 22752 - protein, 59 aa, Artificial Sequence
  Synthetic
EELTKKVEKVVKDAKKTLEEVKREDEDSHKKANDVLRRVRELDKRSHDELKRVLDEVER

SEQ ID NO: 22753 - protein, 59 aa, Artificial Sequence
  Synthetic
SEVEDVLKKLDDIAKEVTERVKRVLDRNEEIVDEVEKLVEEVVRRNKEIVKEVKRLKDE

SEQ ID NO: 22754 - protein, 58 aa, Artificial Sequence
  Synthetic
DLEREVRRVIREVEKVIDDVRREVERSIRKSEKDIREVEKRVEDVNREVEEAIRRVRT

SEQ ID NO: 22755 - protein, 60 aa, Artificial Sequence
  Synthetic
REVEELVKKLKELAERSLTAVERIVEENERLLKRLEDESKRNVDDIERLARELLRRVEEE

SEQ ID NO: 22756 - protein, 59 aa, Artificial Sequence
  Synthetic
ERVERILTKVIEDLERVDKAAHDILREVNERLREVMERVEKTNRTVNRRLEEVLKEIER

SEQ ID NO: 22757 - protein, 59 aa, Artificial Sequence
  Synthetic
DEVEEIAREMREIVDRVLKLSEKTVRENRESVERLLRLSEETVRRIRDLVRRLEELARD

SEQ ID NO: 22758 - protein, 59 aa, Artificial Sequence
  Synthetic
EEMKEKVERAVEEVKRVLDRVRETDKRVNEEVRKVNEEAERIDEKVVREAREVLKRVRD

SEQ ID NO: 22759 - protein, 60 aa, Artificial Sequence
  Synthetic
RVAERLEDVLRELDRTLKDVARKLEEANRDNKRVLEEVAEILKRVLDDLRRVLDEVAKRL

SEQ ID NO: 22760 - protein, 59 aa, Artificial Sequence
  Synthetic
EKVVDDIVKEVRELAERIKEVVTESVKHSKKNVDEMRKLVDDVVKKVKKLVEDVRREIK

SEQ ID NO: 22761 - protein, 60 aa, Artificial Sequence
  Synthetic
SVAEKLRKVLEELRDVLRRVKEISRRSLERLKKVLKELADRLKELNDKLRKTLEELRKDV

SEQ ID NO: 22762 - protein, 59 aa, Artificial Sequence
  Synthetic
EELVEEIVKEIKKLAKEVAETVDKVAKENEKLAKEAKEKVEESERDVERLLEELKREAD

SEQ ID NO: 22763 - protein, 56 aa, Artificial Sequence
  Synthetic
DEEKILEDVLRELKKVLDEVRKTNEDANKRLKDVDDKSHEILKRVEERLREVVKRV

SEQ ID NO: 22764 - protein, 56 aa, Artificial Sequence
  Synthetic
VEDVVRRVRKVAEDVRRSSEETVKRIEDVVRRSEETVRELVKRVEDLVREMEEEAK

SEQ ID NO: 22765 - protein, 56 aa, Artificial Sequence
  Synthetic
SDEEKLRKVERELEEADKESHEINRTVNEDLRRVDRESKEILDRVRKELEEVKDKI

SEQ ID NO: 22766 - protein, 56 aa, Artificial Sequence
  Synthetic
VEDLVRRVRKVAEDSRRSSEDTVRRVERVVRESKRLVDDLVRRARRVVEEIKRTAK

SEQ ID NO: 22767 - protein, 56 aa, Artificial Sequence
  Synthetic
KEDEILKTVVDELRDALREVEERNRTVNEELRRADKESEDRLRKVVRELTEVMKRV

SEQ ID NO: 22768 - protein, 56 aa, Artificial Sequence
  Synthetic
VEELVRRVREVVKRVRDSSRETVERVKRVVERSRRLVERLVRKVEEVVREVEERAR

SEQ ID NO: 22769 - protein, 60 aa, Artificial Sequence
  Synthetic
SDVDRFLREVERLVERARKLSERDERETRKVVKEVRDSSRKSVEDSKRVVEKLEEEARRG

SEQ ID NO: 22770 - protein, 56 aa, Artificial Sequence
  Synthetic
KEKLDKVLEDLRRVVEEVKRRNDEVLKRLKEVVDEVTKRNRKALEDAKERLKKVTE

SEQ ID NO: 22771 - protein, 60 aa, Artificial Sequence
  Synthetic
SEVDEVAKRVREIVERLRDLVRKVVEDNERIAREVKRSSDETLKEIRDIVRKAKEVADRG

SEQ ID NO: 22772 - protein, 56 aa, Artificial Sequence
  Synthetic
ERKIDKVLKELEEVITDVRRTLDDVDRKLREVVKKVEEINRRANEELERVIREVRR

SEQ ID NO: 22773 - protein, 60 aa, Artificial Sequence
  Synthetic
DDVERLLKKVEDIVRELRESSRKSVEEIKRIVKEVKRLVDEVVKENERIVEEAEDVMRRG

SEQ ID NO: 22774 - protein, 56 aa, Artificial Sequence
  Synthetic
REKLDEVLKRARDVLREVEKENDKANKELEEVAERVKKTLDDVDKKLEDVMRKVTK

SEQ ID NO: 22775 - protein, 60 aa, Artificial Sequence
  Synthetic
KEEEIVERVREKIKRVLDEVREIDKRAHDELRRVLKEVEDIVRKVHEDLKRVLEEVRREV

SEQ ID NO: 22776 - protein, 56 aa, Artificial Sequence
  Synthetic
VKTVVETVDKIAKEVRDLSRRSVEENRKLAREVREVVRKVVEDNRRLAREVRERVR

SEQ ID NO: 22777 - protein, 60 aa, Artificial Sequence
  Synthetic
DEDEKVEKVTREVEKALDEVRKIDEEAHRRLKRVLDEVRRIDETVHRDLKRVLDEVRERV

SEQ ID NO: 22778 - protein, 56 aa, Artificial Sequence
  Synthetic
VETVVERLRRLVEDIRRKSRESVERNRELVKEAKDVSRKSVEENKKLVRDITREAT

SEQ ID NO: 22779 - protein, 59 aa, Artificial Sequence
  Synthetic
SVDEIVERVERELKRVLDEVREIHDRARDELRRMHERSERIIRKVEEELERALKEVRDR

SEQ ID NO: 22780 - protein, 59 aa, Artificial Sequence
  Synthetic
DKVVREAVREVERVVTELLEESRRSVEKTERLVRRSEELIRKIVKEVKKVAREIREEVR

SEQ ID NO: 22781 - protein, 59 aa, Artificial Sequence
  Synthetic
SVDEILRKVKEELDRVLEEVTEIHRKAKEELDRAHDTSERIHREVKRELDRVREEVERQ

SEQ ID NO: 22782 - protein, 59 aa, Artificial Sequence
  Synthetic
EKVVKEVVDEVRKVVEEIRKKSKDSVDKTKRVVEESIRTSDEVVKKTEKLVREIEKEVR

SEQ ID NO: 22783 - protein, 59 aa, Artificial Sequence
  Synthetic
SVEEIVRKVTKELRDAHRRTEKILRDVDKELKEVLDRVRKIHRDVKERLEKVLDDVRKR

SEQ ID NO: 22784 - protein, 59 aa, Artificial Sequence
  Synthetic
EEVVTRAVERVKRAVKKSEDDVRRIVDENRKLVKEIEDRSRESVKKTEELIERIRKRVE

SEQ ID NO: 22785 - protein, 60 aa, Artificial Sequence
  Synthetic
NVEDILRKAEEEVRRMLAENERIVEEAKERAKRMLDESRKRLEEVLRRAREVLEEVDKRK

SEQ ID NO: 22786 - protein, 59 aa, Artificial Sequence
  Synthetic
EDVVRAVVEELRRLLEESIRHVRKVVREIEKLLREDIELVKEVVRRIERLLRELDKEVR

SEQ ID NO: 22787 - protein, 60 aa, Artificial Sequence
  Synthetic
RKVDELRKEVRRVVKESRDKAKRVVEEVKRLVEKSRRDVKRVVDENRRVVEEMRRKVKDR

SEQ ID NO: 22788 - protein, 56 aa, Artificial Sequence
  Synthetic
DKEVKDAEDELDKAHEDTKKILDEVKKELDDAHDETRRILEEVNKESETVLEEVER

SEQ ID NO: 22789 - protein, 60 aa, Artificial Sequence
  Synthetic
SLARRVEEEVKRVVDESEEKVRRVVKVNKEMVDDVRRLVKEVVDENEEVVKEVRDTVTKR

SEQ ID NO: 22790 - protein, 56 aa, Artificial Sequence
  Synthetic
REDVRRVEEELKKAHDDTKKILDDVDERSREALDEVRKELDRVNKRSDKALKDVRK

SEQ ID NO: 22791 - protein, 60 aa, Artificial Sequence
  Synthetic
SKAEELVKRVKEVVDKVRKLVEEIEEKVKRVVEKSRRDVTEVVKKNREVVKRVKDTVRRR

SEQ ID NO: 22792 - protein, 56 aa, Artificial Sequence
  Synthetic
EEIVRRAREELERVLDEAKRILEKVTRELDEAHKETEKILRDVNRESDKALEEVER

SEQ ID NO: 22793 - protein, 59 aa, Artificial Sequence
  Synthetic
SEDEKLDKVRKRLERAHEESKKISDKSEKDTRDAHRKTEEILDRVRKEMEEVLKRVRDR

SEQ ID NO: 22794 - protein, 56 aa, Artificial Sequence
  Synthetic
AEEIVKDVERVVKESEDLVRRIVEINERIVRESERLVKEVKDRVRDMVRRLAEEAR

SEQ ID NO: 22795 - protein, 59 aa, Artificial Sequence
  Synthetic
SVEDIIRKVEKEVEEVVEKVERILDTVRRRSEKVLRENKEILEEVKRRADKVLRDVERN

SEQ ID NO: 22796 - protein, 59 aa, Artificial Sequence
  Synthetic
EEVAKRLEDRVREIVRTLEDLVREIVRRSEESVRRSRESAKRVVDTVKRIVDELEKRVR

SEQ ID NO: 22797 - protein, 60 aa, Artificial Sequence
  Synthetic
DVEEIIRRVSDKARKVLDRNRKILEDVKRRSEEVLEENKRIVDEVDEIIDEVLKRVKKRS

SEQ ID NO: 22798 - protein, 59 aa, Artificial Sequence
  Synthetic
REVVDRAVKRVEELVKRSERSADEVRKRSTESVKESKRSAKKVVEDVRRLVEELERRVR

SEQ ID NO: 22799 - protein, 60 aa, Artificial Sequence
  Synthetic
SEEDIIREAERIAREALKRARKIAEDARRISEKALEDARRIAKEAHDISKKALEDAARKR

SEQ ID NO: 22800 - protein, 56 aa, Artificial Sequence
  Synthetic
AKRAAEEAKRLAEEAEEAAKRVADRNRKLAKEAADLAREVAKRSEELAREAAKKAQ

SEQ ID NO: 22801 - protein, 60 aa, Artificial Sequence
  Synthetic
REDEKIEEVKRRAEEVLKESKKIIEDVLKKSEEVIKEVREILEKAHRISAKVLDEVRKTR

SEQ ID NO: 22802 - protein, 56 aa, Artificial Sequence
  Synthetic
VDEVVERVERIVTKNLRLAERVVEENEKLVEDLRRLVADVVRTSKKLVDDVRERVR

SEQ ID NO: 22803 - protein, 60 aa, Artificial Sequence
  Synthetic
SEDEKVDEATKEAERVLREVRKIIKRAHDRSRDAEREVKRTLDEVRRETKRVLEDVDRTR

SEQ ID NO: 22804 - protein, 56 aa, Artificial Sequence
  Synthetic
VDEVVRRVKEIVRRLEELAKEIERRSDEIVEEIRRLVKKVVDENRKIVKKAEEDAR

SEQ ID NO: 22805 - protein, 60 aa, Artificial Sequence
  Synthetic
DEDEIIDEAKKRADEVLKRSEDILRRAREEVEKVLEEVRKIIEDVHRRSRKVLEDVRRKA

SEQ ID NO: 22806 - protein, 56 aa, Artificial Sequence
  Synthetic
VETVVRRVDEIVKRNEELARRLVEEAKKIVDDLRRLAEEIVKRSEDLVEKLKEDAR

SEQ ID NO: 22807 - protein, 60 aa, Artificial Sequence
  Synthetic
SIEDVLRDVARKLRTVVDEARKILDEVDKATEKVLREAERVIREVAKRDKKVVDEVRKGG

SEQ ID NO: 22808 - protein, 56 aa, Artificial Sequence
  Synthetic
AEDLLKLVEDVVRRIRKLAEDVKRENDKLVERIREVAEDVLRHSEETVEEARKAAE

SEQ ID NO: 22809 - protein, 60 aa, Artificial Sequence
  Synthetic
SSEEALKEVERRLEDVRREVKRVAEEIKKKDDKVNDDAREKLERVNRETKRVLEELAREG

SEQ ID NO: 22810 - protein, 56 aa, Artificial Sequence
  Synthetic
VEELKDKVRRLLEELKRLLEELDKHSARTIKEIRDLIETLRRINEKVIEDMKRRRD

SEQ ID NO: 22811 - protein, 60 aa, Artificial Sequence
  Synthetic
SELDEAKRLVDEVVRRLEELLREDKKLVAEVEREVRELLERNARLLKEVADRIRRLKEEG

SEQ ID NO: 22812 - protein, 59 aa, Artificial Sequence
  Synthetic
EKVVREIERLLRELEKALEDVERELRRSKDRLRKLAEEVKKVLDDSRRELERLREELRT

SEQ ID NO: 22813 - protein, 60 aa, Artificial Sequence
  Synthetic
KDIEDAVRDVRRKVKELIENSERVVRTVEKLVRELIDHSRKVVREVEKLAKELIELKRRG

SEQ ID NO: 22814 - protein, 56 aa, Artificial Sequence
  Synthetic
EEVLKEVDRVLREAEKRSKEINEESKRVLDKAERDSRRIDRKSEEVVKRAEEEVRT

SEQ ID NO: 22815 - protein, 60 aa, Artificial Sequence
  Synthetic
EEIERVLRRVTERLKELERHSEEVLREVERLVKEDEDLAREVVKRVEELIRTLRELKKRG

SEQ ID NO: 22816 - protein, 56 aa, Artificial Sequence
  Synthetic
RRVLEEVREVVDRAEKKIKELDDRSREVLKEVEKRSRDIIREIEEKLKDVEERVKD

SEQ ID NO: 22817 - protein, 60 aa, Artificial Sequence
  Synthetic
SKAEEVAKRVEDLAREDIKLAERAAREVERLARENIKLAREVAKRVEELARRLIEAARRG

SEQ ID NO: 22818 - protein, 56 aa, Artificial Sequence
  Synthetic
EKALKDAEDAARKAAEDSERAIERAERAAKDALKKSEDAAEEAKRAADKALEDAAR

SEQ ID NO: 22819 - protein, 60 aa, Artificial Sequence
  Synthetic
DEVRDLVRRVRELSEELIRRVRTLLREVEELSRRLIEESERLLREVRKIVEELIRRVERR

SEQ ID NO: 22820 - protein, 56 aa, Artificial Sequence
  Synthetic
ERVVKEAEEVVERANRESEKLLEDVKRVVEEANKTSEDILRAVEEIVRRVLEELKK

SEQ ID NO: 22821 - protein, 60 aa, Artificial Sequence
  Synthetic
SSKEVLERVAEKLKEVNERLKDVLRRVAEKLKRANEENKKVLERVRDILREVLRRLREKV

SEQ ID NO: 22822 - protein, 56 aa, Artificial Sequence
  Synthetic
VEEAERVVEKSVEEARRLAERVKEEVDRSVKHSEDNVREMRRLVEEIVKRVEEAAK

SEQ ID NO: 22823 - protein, 60 aa, Artificial Sequence
  Synthetic
REKEVLDRVEEILRDANRRNEKVLREVAEIIRTVIEDNKRVLKEVADELRRVLEELRDKV

SEQ ID NO: 22824 - protein, 56 aa, Artificial Sequence
  Synthetic
VEEMEDVVRRSLDHSRRNVEEAKKAVTKVVEDNKDNVRRIKEVVARVVEKAREEAR

SEQ ID NO: 22825 - protein, 60 aa, Artificial Sequence
  Synthetic
SEVEEVLRRSRESAKKSKEHSRELLEKVKRIIDDVKRLVREVLKRSRDSIKRVEDLTRRG

SEQ ID NO: 22826 - protein, 58 aa, Artificial Sequence
  Synthetic
EKVKEAVKESRDLLRKVEETNRRVNDEVRKLLEDIRRDVERAVEESERLLEDIVRKVK

SEQ ID NO: 22827 - protein, 57 aa, Artificial Sequence
  Synthetic
SDVERVLTEIRKLVEDIKRDVERVVDESRKLVEEAERDVERVITEVEKLVERIKREV

SEQ ID NO: 22828 - protein, 56 aa, Artificial Sequence
  Synthetic
ARELLKRVRELIKEHNRLNRESLKTSRKNIEDHHEDNKRSLEEARRIIEEVREAAR

SEQ ID NO: 22829 - protein, 60 aa, Artificial Sequence
  Synthetic
KELEDVEKEVEEVAKRVEDSIRRNREVVEKVKDEVRRLLDRNDELVDRVAKEITEAIKKG

SEQ ID NO: 22830 - protein, 58 aa, Artificial Sequence
  Synthetic
EKVKKVLEDVRRRLEELIKRSEDSAREVEKRLEDLRREVEESLERVERTLEDLVRRVK

SEQ ID NO: 22831 - protein, 60 aa, Artificial Sequence
  Synthetic
SELERLEERVRRIEEEVKRLLEEHREVSDRVAKENRRSNEESKREVRRIEEEVKDLSRKG

SEQ ID NO: 22832 - protein, 58 aa, Artificial Sequence
  Synthetic
EEVKKVVEDVKRRLDDLIRKAEKVVRDSERELKKLVDHSKEVVDRVRERLKELIEEAR

SEQ ID NO: 22833 - protein, 60 aa, Artificial Sequence
  Synthetic
SEVEDLERRVKRILEESDELVKRHEEKSRKIVKDLEDLLRRNEDTVEKILRELEKRIRDG

SEQ ID NO: 22834 - protein, 58 aa, Artificial Sequence
  Synthetic
ERVTRVVEKVRRLLEESKRRSKEVVKRSKDLLKEAEDRADESVRELRRKLKELEEKAE

SEQ ID NO: 22835 - protein, 59 aa, Artificial Sequence
  Synthetic
SELEDIRRLLEKLDREVKELLKRSRDLAKEMEERVRKLVKESEDELRKLAEKVDRIKKN

SEQ ID NO: 22836 - protein, 58 aa, Artificial Sequence
  Synthetic
DEAREVLKDVRRKVEELRKELTKVDKEIEEIVRELEKRLREVNERVRTIVDELAKRLK

SEQ ID NO: 22837 - protein, 56 aa, Artificial Sequence
  Synthetic
SMLEELDKEARELLKEVRRLVEDNDRLLEELLRRARELLERNDRISEKVADEVRKI

SEQ ID NO: 22838 - protein, 58 aa, Artificial Sequence
  Synthetic
ERMREVAKKVKDILKRAEEEVRESLERVRRELERVIRELEDSLRRNDKTLRDLIEERR

SEQ ID NO: 22839 - protein, 56 aa, Artificial Sequence
  Synthetic
SDLERLDELLKRVLEKARKLVKENDEHSEEVRKTVEKVVRDNDKLAEDLADKVEKI

SEQ ID NO: 22840 - protein, 58 aa, Artificial Sequence
  Synthetic
ERVKEVLDRVDEILKRVIKAAEESLKRSHEINRRLIKAAEDSLRRVKKILDELEERVR

SEQ ID NO: 22841 - protein, 56 aa, Artificial Sequence
  Synthetic
STLDKLRELLRRVEETVREVLERNDEHSKEVKRRVDKLLRENDEHSKELADLVRKI

SEQ ID NO: 22842 - protein, 58 aa, Artificial Sequence
  Synthetic
REMEKVLTDARRSLRRLEERVRESLERSHRINRKLRKDVRESLERSKRILDKLREEVR

SEQ ID NO: 22843 - protein, 56 aa, Artificial Sequence
  Synthetic
SVLEELRKLVEKVLREVDKLLKDNNRHSEEVEKTVKRLLDENDRLLEELADRVEKI

SEQ ID NO: 22844 - protein, 58 aa, Artificial Sequence
  Synthetic
EEAKKVLTEVRRTLEELERRVRKSLKDSHDINRKLEKEVRDSLKRVKDRLDELIKRVR

SEQ ID NO: 22845 - protein, 57 aa, Artificial Sequence
  Synthetic
RKAEEVLKRAKKIVDEVDKKNRESLERTRKIVEDVNEENREVLDRLRRRAEELKKEV

SEQ ID NO: 22846 - protein, 59 aa, Artificial Sequence
  Synthetic
DDVVRRIEEVIEKARRENDESVRRDEKLMKEVKDENKKTVDDIRRLLKDIEDKVREAKR

SEQ ID NO: 22847 - protein, 57 aa, Artificial Sequence
  Synthetic
SKLEEVVKRLEEIVRRVKRADEESLKRTRKIVEEVNRDNRRSLKESRDRVDELKKRV

SEQ ID NO: 22848 - protein, 59 aa, Artificial Sequence
  Synthetic
DEVVKRIEEVAKRNEELNRETVKRDEDLVREAKRRNEETVERDKRLVEKITKEVDETKK

SEQ ID NO: 22849 - protein, 56 aa, Artificial Sequence
  Synthetic
SLIETIRDLAKKLKEESDKSVETDKRLVEELRRRSKKTVDDIDELVKRLERMVEDD

SEQ ID NO: 22850 - protein, 58 aa, Artificial Sequence
  Synthetic
EDAKRVLEELKRIIEDLLRKNKKSLDDTEREVRRLIKENETVVRKLEEIVKRLEEKIR

SEQ ID NO: 22851 - protein, 56 aa, Artificial Sequence
  Synthetic
SLLEEIAELVERLRRESKESVKRDEELVDELKKRSEETVKEDKRLAEELDRLAKKI

SEQ ID NO: 22852 - protein, 58 aa, Artificial Sequence
  Synthetic
EEMKKVLDDLRREIKKLEEENERSLERTRDIVRKLDRTNEESARESEKIIREVVKEVK

SEQ ID NO: 22853 - protein, 56 aa, Artificial Sequence
  Synthetic
SLLERIKEEVEKLRKESEESVETDERLVEELKKEVKDLVEKDRKLAEDLKDEVDKD

SEQ ID NO: 22854 - protein, 58 aa, Artificial Sequence
  Synthetic
ERAKEVLRDLRRTVKELTDENEKSLERTRREVEKLIRELEESLRESRRRVKRLLEKVK

SEQ ID NO: 22855 - protein, 56 aa, Artificial Sequence
  Synthetic
SLLEEIERRVEELEDRSRKSVERDKELAKEVDDRNEESVRTDEELAKRLADLVRKR

SEQ ID NO: 22856 - protein, 58 aa, Artificial Sequence
  Synthetic
ERMEEVLKRLKEIVKELEERNRESLERTRRILEEVDRKNEESLKRSREIVRELDERVR

SEQ ID NO: 22857 - protein, 56 aa, Artificial Sequence
  Synthetic
SLVEEIERRVEKLAEEVKRLVERDRKEVEKLEKESRDTVREIEELADRLRDAVEKE

SEQ ID NO: 22858 - protein, 58 aa, Artificial Sequence
  Synthetic
DEMRKVLTRLREEVRRLLDELRRSLEDTKRTVEDLERKNKTVVDELRKTVAELERRAR

SEQ ID NO: 22859 - protein, 59 aa, Artificial Sequence
  Synthetic
SIDEVLKRIREISDDAKRKIKEVVEEIKKNADRLRREIERVLDEIRKVIRELLERIKRV

SEQ ID NO: 22860 - protein, 59 aa, Artificial Sequence
  Synthetic
DEDLERLLREVERRTRRHEEELERLLRHNNKVSKEVREELKRLLDRVREMLEDVDRKLK

SEQ ID NO: 22861 - protein, 59 aa, Artificial Sequence
  Synthetic
SVEEVRKEVKRISDEAREEIERVLERIKENAKRLIEDIRRVLEEIEEIIRRLEDEIRRV

SEQ ID NO: 22862 - protein, 59 aa, Artificial Sequence
  Synthetic
DEDLEELLRRLERISRESRKRLEELLKHNNKESEEVRKRLKELLDDVRRVVEEVRRKLK

SEQ ID NO: 22863 - protein, 59 aa, Artificial Sequence
  Synthetic
SIDEVLEELKRISTEAVERIRRVAERNRKSVEEVRKRIEEVAKRIREIATRLLERIRRV

SEQ ID NO: 22864 - protein, 59 aa, Artificial Sequence
  Synthetic
DEELKKLLDELEKISRDSDERLKESTKKVRDVNRESDKKLKELLKRVEDVLEKVDRELK

SEQ ID NO: 22865 - protein, 59 aa, Artificial Sequence
  Synthetic
SVDEVLERIRESAETILEEIRRVLERNKRSAETILEEIRDVARKIEKRIRDVLKKIEDV

SEQ ID NO: 22866 - protein, 59 aa, Artificial Sequence
  Synthetic
DEELRKLLEEVKKINDDSRRKLEKSTRDVKKVNDDSRRELERLLRKVEEVIRRVDEELR

SEQ ID NO: 22867 - protein, 60 aa, Artificial Sequence
  Synthetic
KLEELVEEVEKVVREVKKELEDVVRTVREVVKRSKDDLREVVKEVERINRELEERLRRLA

SEQ ID NO: 22868 - protein, 55 aa, Artificial Sequence
  Synthetic
TELLERVKTLIKEIRDRLRRLLEEVKRLVEESKKDLKRLLDENKRLVDEATKTAK

SEQ ID NO: 22869 - protein, 60 aa, Artificial Sequence
  Synthetic
SLEELLKEVEKVIRDVKRELEKVVRDIEENVRRSAKRLREAEEEVERINRRLEEELKKKT

SEQ ID NO: 22870 - protein, 55 aa, Artificial Sequence
  Synthetic
TELLKRVRDLIRRIRETLEKLLKENHDLSKRSKEDVERLLKENADLVKELTDRAE

SEQ ID NO: 22871 - protein, 60 aa, Artificial Sequence
  Synthetic
SLEDLLREVKRVIEEVKRELEEVVRRVKEIVERSVRDLRRVVDEVRRINTELEERLRRLT

SEQ ID NO: 22872 - protein, 55 aa, Artificial Sequence
  Synthetic
TELLRRVEELIKEIRKELKRLLDEVKDLVDKSKENAKKLLEDNKRLVEKIARDAT

SEQ ID NO: 22873 - protein, 60 aa, Artificial Sequence
  Synthetic
KLEELVREVEKVVDDIRKELEEVVRRVEEVVRRSKRTLEDVVRRVKKINDDLEKELRERS

SEQ ID NO: 22874 - protein, 55 aa, Artificial Sequence
  Synthetic
TELLEDVKRVLDEIRETLERLLRKVEELVERSKRNAEELLKRNEDLAKKVRDDAK

SEQ ID NO: 22875 - protein, 56 aa, Artificial Sequence
  Synthetic
DVEDVLRKIEEIIRRVLEEIKTVLDEIRKNNEKLKEDVDRVLAEIEKDSEDLKRKI

SEQ ID NO: 22876 - protein, 58 aa, Artificial Sequence
  Synthetic
ELAETILRRVEELVEEIRRRLKEILDRDHELSKRLKEELKKILDDNHKLSRDAAERAR

SEQ ID NO: 22877 - protein, 56 aa, Artificial Sequence
  Synthetic
SVEDVLREIKETSDDAARKADEVLKEIEKNNRRLKKEIDRVHEHTKEDSRRLKEEI

SEQ ID NO: 22878 - protein, 58 aa, Artificial Sequence
  Synthetic
DLMREMLERNRKLIEDLKRELEDILRRDHRLSKELLARLKESNEENHRLSKEIRERRK

SEQ ID NO: 22879 - protein, 56 aa, Artificial Sequence
  Synthetic
RVEDVLRKVEEIIRRLKEEIDRVLEKIRETSERAVKDIRDVLRRIREDSKRLKEDI

SEQ ID NO: 22880 - protein, 58 aa, Artificial Sequence
  Synthetic
EDAERIVEEVRKLVEEIRKELEDILRKNEKLIEDLKRELKKILEENHRLSREIRERRR

SEQ ID NO: 22881 - protein, 56 aa, Artificial Sequence
  Synthetic
SAEDVLREITKTSERAREDIKRVLDEIKRTSDEAVKTVTDIHEHTRKTSEDLKRKI

SEQ ID NO: 22882 - protein, 58 aa, Artificial Sequence
  Synthetic
EVLRKILEENRELIERLKKELKELLDRNRKLIEDLLREAEKSNEDNKELIKKAEEDAR

SEQ ID NO: 22883 - protein, 56 aa, Artificial Sequence
  Synthetic
SVEKVLEDITRELRRADEESKRALDHSAEVLKDLERRVKEVLDESREIIKELERRL

SEQ ID NO: 22884 - protein, 59 aa, Artificial Sequence
  Synthetic
DEEAKRVLDEVEKLVRELKKRNDELNEKTERLVRDLRRRLKDSLDKSRDLVRRLEEKAK

SEQ ID NO: 22885 - protein, 56 aa, Artificial Sequence
  Synthetic
SVEEVLDEVRRIIEELLRLSEEMLRHSEEVIRDLERVSREVLERSKRIIDELLREL

SEQ ID NO: 22886 - protein, 59 aa, Artificial Sequence
  Synthetic
DEVAKRAVEDVRRVVEDLERRNRTLNEKTKRLVEKLTRDNERSLKESKKVVDELREEAR

SEQ ID NO: 22887 - protein, 56 aa, Artificial Sequence
  Synthetic
SVEEVLDEIRKRIEDLKREVDEVLDRSRRIIETLKERVDRVLKHSRELIKRLKDKL

SEQ ID NO: 22888 - protein, 59 aa, Artificial Sequence
  Synthetic
DEEMKRALEEVKKLLDRLREELKRSLDESRKLVEELERRLRESNEESERLIRKLEREAD

SEQ ID NO: 22889 - protein, 56 aa, Artificial Sequence
  Synthetic
SVEDVLREVEKIIRELDRKSEKVLEDSKRVIEDLKRKVEEVLRHSETLIRDLERRL

SEQ ID NO: 22890 - protein, 59 aa, Artificial Sequence
  Synthetic
DELAKEMVDRVRELVKKLEEENRRSLEESKKLVEELARRLERSNTESKRLIDKLREEAR

SEQ ID NO: 22891 - protein, 56 aa, Artificial Sequence
  Synthetic
SVEEVLKDIEKKIRDLDRKVKEALRHSEEVIRRLEEEVKRVLDDSERILRDLKEKL

SEQ ID NO: 22892 - protein, 59 aa, Artificial Sequence
  Synthetic
EELMRRIVEKVEELVKELDKRLRESNEDSKRLVEDLSRRAKKSLEESRELVRELKKRAK

SEQ ID NO: 22893 - protein, 56 aa, Artificial Sequence
  Synthetic
SVEEVLDRIRKIIKELLDRSEEALRHSEEVIKDLERKVEEVLERSREVIRELLERL

SEQ ID NO: 22894 - protein, 59 aa, Artificial Sequence
  Synthetic
DEELKTMLEEVKKVVEELLRRNRKSNEDSKELVKELTRRLRKSLEDSKELVRKLEEEAR

SEQ ID NO: 22895 - protein, 56 aa, Artificial Sequence
  Synthetic
SVEDVLREIEEILRRLEKESDDALEHSRRVIKRLEEESDRVLEESRRVIEELERKL

SEQ ID NO: 22896 - protein, 59 aa, Artificial Sequence
  Synthetic
DEEMKKLLEDVKRLVDDLRRKNEESNRRSKELVDKLDKENKDSLKESRELVEKLEREAR

SEQ ID NO: 22897 - protein, 59 aa, Artificial Sequence
  Synthetic
SVEEVVREVEEKLRKLIDDVRRVVEENRRNTERLRKRVTEVVKRNEDILRRLEEDIRRV

SEQ ID NO: 22898 - protein, 59 aa, Artificial Sequence
  Synthetic
EEVAKTALRKVEDLLKKLKERAEDSSRDNHRISKELTEELEESSKRVKTLVDELRKTVK

SEQ ID NO: 22899 - protein, 57 aa, Artificial Sequence
  Synthetic
SVEEVLKESREISTRLAEEVKRVLDEIRRILERVKRINEKVNKDIEEILRRVKKTVG

SEQ ID NO: 22900 - protein, 59 aa, Artificial Sequence
  Synthetic
ERVAEKILKEDRDTVERLRKRVEDLLRDVRRLVEDSERKSRDLLRRVEELVRELKKRVD

SEQ ID NO: 22901 - protein, 57 aa, Artificial Sequence
  Synthetic
SVEEVLKESKRVSEELNELNKKVNDDIRKILEKVNRENKKVNEDIERELRKLEEEVG

SEQ ID NO: 22902 - protein, 59 aa, Artificial Sequence
  Synthetic
EEVAREILRDDKRTVEESKRESKRLLERVKKLVDRSAEESKKLLEDVKRLLEELRERAR

SEQ ID NO: 22903 - protein, 57 aa, Artificial Sequence
  Synthetic
RVDEVLDESKKVSDRLHESIRRVLEKIEEILRRVNEENRRVNEEMKRILDELARTVG

SEQ ID NO: 22904 - protein, 59 aa, Artificial Sequence
  Synthetic
ERVAREILKADRETVRRLEKRAKDLLDEVRDLVRESEKRSRELLKEVEDLVRKLTEEAR

SEQ ID NO: 22905 - protein, 57 aa, Artificial Sequence
  Synthetic
RVEEVLKRMRDILRRVNEINRRVNRELERSSREILERIREILDRIRRILERLEERVG

SEQ ID NO: 22906 - protein, 59 aa, Artificial Sequence
  Synthetic
EKVARDLLREVEELVKESEELSEELLRRSRRSNEESLRKAEKLLETVRRLVEELEKKTT

SEQ ID NO: 22907 - protein, 60 aa, Artificial Sequence
  Synthetic
SEAEAVEEEVRRLVEESEKRSKELLEDVERLVEESERRSKKLLDDVRKLVDDLKKELRRV

SEQ ID NO: 22908 - protein, 56 aa, Artificial Sequence
  Synthetic
DRVIERLKRILKEAHDKNKEVSDRIRKILEELHRKNRKVLEDIKRILDDVRREVER

SEQ ID NO: 22909 - protein, 60 aa, Artificial Sequence
  Synthetic
KEAEDLLREVEKLVRESKKLSEDLLREVRKSNERSKRESERLLREVERLVRELKDLRDKV

SEQ ID NO: 22910 - protein, 56 aa, Artificial Sequence
  Synthetic
DRIIERIKRILEKVHKINREASKRIKESLDRAHETNKRVLDRIRKIVDDVRREVER

SEQ ID NO: 22911 - protein, 56 aa, Artificial Sequence
  Synthetic
RLEEVKEELKRIATKLKEEIKENIRRLEESVEKIAKELAENIKRLEDILRDVKRKL

SEQ ID NO: 22912 - protein, 56 aa, Artificial Sequence
  Synthetic
GEELVERLRRVVEEVRERLKDSSRELRKINEDSRKKVEDSSREVKKVVEELERRDT

SEQ ID NO: 22913 - protein, 57 aa, Artificial Sequence
  Synthetic
KELEDVARKVEDLLRRIEKTNRDAIRESERLVRELKREVEKVEEESRRLLEEVERRI

SEQ ID NO: 22914 - protein, 56 aa, Artificial Sequence
  Synthetic
AKKLLDEVRKVIEDNRKRSEELLEENRKVVEDVSRTLERILRENERVADEVDKEER

SEQ ID NO: 22915 - protein, 57 aa, Artificial Sequence
  Synthetic
DELERVTEEIDKLSKDLERRVREVLEESRRLVEDVERVVREVLEEARRTAKDIADKV

SEQ ID NO: 22916 - protein, 56 aa, Artificial Sequence
  Synthetic
VDKLLEEVRKISEDSKERLKEILKRNEEVARRVKRELKRLLETNREIIRRVEERER

SEQ ID NO: 22917 - protein, 56 aa, Artificial Sequence
  Synthetic
RELEELLDKVRKIVEESKKRNEDLLREVREIVERSKEKIKKVLDEVRKIIETVRKS

SEQ ID NO: 22918 - protein, 58 aa, Artificial Sequence
  Synthetic
KEVEKVLRDVEELIRDSERASDRVLKDVEELIKDSERMSKKAEEDVDRLLRELDKDVR

SEQ ID NO: 22919 - protein, 61 aa, Artificial Sequence
  Synthetic
DSVERVAEEVRKLLEDIKRVSDEVTKRLRDLLEDLKRVSDKVRKDIERLLEDLEREVRRKG

SEQ ID NO: 22920 - protein, 59 aa, Artificial Sequence
  Synthetic
DRVLEEALRRVEELARRIKEHSKRVLETVRRLVEEIKKHSRKVLEEVRERIKRIKDELR

SEQ ID NO: 22921 - protein, 61 aa, Artificial Sequence
  Synthetic
SEVEKAEKDVRDLLKDLRRVSEKVKRAVEDLLRDLKRTSDKASEDAKRLLDDLRRKVEERG

SEQ ID NO: 22922 - protein, 59 aa, Artificial Sequence
  Synthetic
DRVVKEILDEVEKLIREIKKHSEDLLRKVRKDIKRVKDHTKRVLDRIRKLIEDIKRRLE

SEQ ID NO: 22923 - protein, 60 aa, Artificial Sequence
  Synthetic
DEVKELLDRVREEIRRDKERVKKLLEDSKRLNERDKREVKRLLEEVRELIKRLEDIIRKS

SEQ ID NO: 22924 - protein, 55 aa, Artificial Sequence
  Synthetic
EEVVKDLERLLRDLERVNDEVEKRLRDLTEDSKRFNDEVAREIEKLLEDVARTVK

SEQ ID NO: 22925 - protein, 60 aa, Artificial Sequence
  Synthetic
REAEELLKRVEDLIRRLKDMIRKLLEDSKRLNERDVETVKRLLEDVERTIREIKDEVRRD

SEQ ID NO: 22926 - protein, 55 aa, Artificial Sequence
  Synthetic
ERIVREVEKLLEKIKRDVDRVRRELERLTEESKRINDKAVRDIEELLEDLKRAVK

SEQ ID NO: 22927 - protein, 59 aa, Artificial Sequence
  Synthetic
DELERLLEDVERVSRETKKLLKKLLDDAKRVIDKNREDSRRSLEEVERVIREAKELLKD

SEQ ID NO: 22928 - protein, 62 aa, Artificial Sequence
  Synthetic
KDTERRVRDVVKKIRELSEDVEREAKKVIDRLKELLEDIERENRRVEEEIKKLLEDVERTAR

SEQ ID NO: 22929 - protein, 59 aa, Artificial Sequence
  Synthetic
KLVERLVKEAEDLTEEHKERLDRLLKENEKISRESKKRLKEILEENERVVEEVKKLLRD

SEQ ID NO: 22930 - protein, 59 aa, Artificial Sequence
  Synthetic
RKKVDEVRRRLEELHKELEKVVRDVKRTSEKLVRDSEDMARKVVKTSEDLLRELEEEAR

SEQ ID NO: 22931 - protein, 59 aa, Artificial Sequence
  Synthetic
SRAEDLVRRVEEMTRKHKKDLDDLLRENEEVSRRSKERIRKLLKDIKDVVDDVERVLRA

SEQ ID NO: 22932 - protein, 59 aa, Artificial Sequence
  Synthetic
RDKVEEVRERLKKLHTELEKRVREVKRDSERLVEDSERTVEELLRRVRKLLKEVRDSVK

SEQ ID NO: 22933 - protein, 60 aa, Artificial Sequence
  Synthetic
SEAERLVEEAERVTREHKKRLDDLLKEVRRVSEDSKRKLEKILKENEDVVEEVKELLKAG

SEQ ID NO: 22934 - protein, 59 aa, Artificial Sequence
  Synthetic
KEKVDRVRRELDRLHKELAEVVERVKRAVDKLLRDSEEEVKRVEERSERLLKEVADALR

SEQ ID NO: 22935 - protein, 59 aa, Artificial Sequence
  Synthetic
SDVDKLVDDVRRETEKHKKTARDLLDELRKVSEESRRRLKRLLEEITEVVERIKRVLEA

SEQ ID NO: 22936 - protein, 59 aa, Artificial Sequence
  Synthetic
EEEVRRAKEELDRLHKEVEDVVRDVTRELDRLLKRSREVVERVREEADRLLEEVERTLK

SEQ ID NO: 22937 - protein, 59 aa, Artificial Sequence
  Synthetic
SEVDELVERAERISRESKKTIKKILEDNERVSKRHKDELKKLLDELKRVVDEVRKVLER

SEQ ID NO: 22938 - protein, 59 aa, Artificial Sequence
  Synthetic
KEKVERALRELDRLLEESKRVVDEAEKTSDKLNKEVEEMARRVEEEVDRLLKEVRDDAK

SEQ ID NO: 22939 - protein, 59 aa, Artificial Sequence
  Synthetic
SEADELVKEIEDVSRRSKEELTRLLEEAEKVSREHKKTLEELLRRIEKVVRDIKEVLRG

SEQ ID NO: 22940 - protein, 59 aa, Artificial Sequence
  Synthetic
EKKVREVEKLLDKLLEESRKRAKEVLRALRELNREVAEVVRRVEERLRRLLKEVEEAVR

SEQ ID NO: 22941 - protein, 59 aa, Artificial Sequence
  Synthetic
SDVDKIVEEIERISRDSERRIREIVERNKKVSEDHKRELERLLKEMEKVVEDVKKVLKD

SEQ ID NO: 22942 - protein, 59 aa, Artificial Sequence
  Synthetic
KKKVDEARKKLRDLLERSKEVVKEAERRLEKSNRDVRREAERVRKALDDLLKEVDEAVR

SEQ ID NO: 22943 - protein, 59 aa, Artificial Sequence
  Synthetic
SRADELVERAKRMTDEHKKTAEDILRENKRVSDEHKKTLEKILRENEKIVDEVAKLLEE

SEQ ID NO: 22944 - protein, 59 aa, Artificial Sequence
  Synthetic
KDKVREVEEELKRLHKEVEDVVDTVRRTSEKLNDEVRKVVETVTRRSEELLEELRRRAK

SEQ ID NO: 22945 - protein, 59 aa, Artificial Sequence
  Synthetic
KEVEKLVTEIREMTERHKRTLEELLKEAEEVSRRHKEDLKRLLDENRKIVEEVARVLEK

SEQ ID NO: 22946 - protein, 59 aa, Artificial Sequence
  Synthetic
KDKVERVLREADRLHEEVRKVVEKVREELRRLNEEVRKVVEEVRRDSERLVREVEERAR

SEQ ID NO: 22947 - protein, 59 aa, Artificial Sequence
  Synthetic
SRVDELVDRARKMTEKHKEELKRIVEENRRVSKEHKERLEDILRRNAEIVERVKEVLKR

SEQ ID NO: 22948 - protein, 59 aa, Artificial Sequence
  Synthetic
EDKVRRALEELKKLHDELAKEAKRVEELLDKSNEEVEKVVRDVREASERLLEELERTAK

SEQ ID NO: 22949 - protein, 59 aa, Artificial Sequence
  Synthetic
DEVKKLVDDARRLTEKHKTDLERLLDEARKVSEEHKKRLEELLREIAEVAKEILKVLRK

SEQ ID NO: 22950 - protein, 59 aa, Artificial Sequence
  Synthetic
REKVKRVEETLERLHKEVEEVVRRVKKALRDLNDEVRRVVDEVRRRLEELLKRVEEEAR

SEQ ID NO: 22951 - protein, 63 aa, Artificial Sequence
  Synthetic
REVDEVEERVTRLLKKVRDVAEESRRRSEELLKKSRDVVEEVKKEVDKLLEEVRDMVRRVKDK

SEQ ID NO: 22952 - protein, 59 aa, Artificial Sequence
  Synthetic
GRVLKKLVEEVKKLADEIERELERTSKEIEELSRRSEEDLRRLVRKLREVVRKIEEDLR

SEQ ID NO: 22953 - protein, 63 aa, Artificial Sequence
  Synthetic
REVERVERELERLLEEVREVAERSERESKKLLEDTRRVVRKVKEDVRRLLEEVRDVVRKVKDK

SEQ ID NO: 22954 - protein, 59 aa, Artificial Sequence
  Synthetic
GDVIRRMVEEVEKLARRIKETLERTVRRLEELVRRSEKNLRTLVEEVRKAVERIKETLR

SEQ ID NO: 22955 - protein, 63 aa, Artificial Sequence
  Synthetic
SEAERVEEDVRRLLKRVEEVIKRSEERSRELLKKTEDVVREVRKRVKKLLDEVKDTLDKVRDK

SEQ ID NO: 22956 - protein, 58 aa, Artificial Sequence
  Synthetic
EVLDRLVEELRKLVEEIERDLERTVREIEKLVKDSDRNLEDMVRELRRVAERIKEELR

SEQ ID NO: 22957 - protein, 60 aa, Artificial Sequence
  Synthetic
REVDEVRRRAEELLKEVRDVVTESEKESRRLLEDTRRVVEDVKRRVDRLLEEVRDLLREV

SEQ ID NO: 22958 - protein, 58 aa, Artificial Sequence
  Synthetic
DVLRELVKRLEDVAREIKKRLEDTLRKLEEVSRRSKENLRELVERLRRIADEIRERLR

SEQ ID NO: 22959 - protein, 61 aa, Artificial Sequence
  Synthetic
DEVDRVREEIERLLREVEEVLERSERESRRLLREVEEMLERSDEEVRRLLKEVEEVLRDEL

SEQ ID NO: 22960 - protein, 58 aa, Artificial Sequence
  Synthetic
EVLEEILRRAKEEVEKLKRELERTVERLAELVEELKRELERSTREVRKTVEELKRRIK

SEQ ID NO: 22961 - protein, 61 aa, Artificial Sequence
  Synthetic
DEAEDLERRARELLEEVERVLEESIRRSEETVKEVEDMLRRSTEEVERLLKRVEDVLREEL

SEQ ID NO: 22962 - protein, 58 aa, Artificial Sequence
  Synthetic
ELLKRLIDEVRRLAEKIKEELKESSKRDEEKVEKLKKELKDSTDAVRELVERLEREIK

SEQ ID NO: 22963 - protein, 60 aa, Artificial Sequence
  Synthetic
DEVEELVKEVEERIKKVHKENEDVLRESEELMKRLHEENERLLREVEELVRRIRELRKRG

SEQ ID NO: 22964 - protein, 55 aa, Artificial Sequence
  Synthetic
REARERIRRLLTESRKSVEEVEKRLRELSKRSEESVERVERTARRLLKELEDMTR

SEQ ID NO: 22965 - protein, 60 aa, Artificial Sequence
  Synthetic
EEVKRLVEKVRKLIEDSKRRNRDVLRRVEELVRRVHRRNEEVLRRVEKLVEDIKELLRRG

SEQ ID NO: 22966 - protein, 55 aa, Artificial Sequence
  Synthetic
EEAEREIERLLEESKRSVEEVEERIRRLIRESEESVREVKERIDELLKDADRATK

SEQ ID NO: 22967 - protein, 60 aa, Artificial Sequence
  Synthetic
REVEELVKDVERLMREVHRRNEKVVEEVEALIRKSKEDNERVAREVERLVREVEKMLRRG

SEQ ID NO: 22968 - protein, 55 aa, Artificial Sequence
  Synthetic
REAKERIKDLVRKSRDSVREVRERIRRLLEDSKRSVDDLARRIRELLRKAAEKAR

SEQ ID NO: 22969 - protein, 60 aa, Artificial Sequence
  Synthetic
DEAEELVDRVRKLAEDVHKKNEDVLRESDALVKDSDRRNREALRRVEKLVEDVEELLRRG

SEQ ID NO: 22970 - protein, 55 aa, Artificial Sequence
  Synthetic
EEVKRRIKELLKRVEESVRTVEEELRRLSKESEESVKRVEDRIRELLKRLRDAAR

SEQ ID NO: 22971 - protein, 60 aa, Artificial Sequence
  Synthetic
DEAEDLVRKVRKLIEESKKENEDLLREVRELVARVHEENERVLREVEKLVEDIRRLLRRG

SEQ ID NO: 22972 - protein, 55 aa, Artificial Sequence
  Synthetic
REVKKAIEDLLKESEDSVREVEEEIRKLLKDLEKSVRDVERAIEKLLDELRKDTK

SEQ ID NO: 22973 - protein, 60 aa, Artificial Sequence
  Synthetic
REVEELVREAEELVRRVHKRNEDALRRSKKLVEDVHRKNEEVLKRVERLVERIEELLRRG

SEQ ID NO: 22974 - protein, 55 aa, Artificial Sequence
  Synthetic
KEAAERIKRLIDEVRKSVEEVERRAEELSRELRRSVKEVRDALKRLLDDLRRATT

SEQ ID NO: 22975 - protein, 60 aa, Artificial Sequence
  Synthetic
REVEELVKEVRRRVREVHERNRRVLEDSERLVREVHKRNEEALRRSEELIKRVEDMRRRG

SEQ ID NO: 22976 - protein, 55 aa, Artificial Sequence
  Synthetic
ERAEREIRRLLEEVKKSVEDLTRKARKLSRDLERSVREVEERARDLSRRLREKTR

SEQ ID NO: 22977 - protein, 60 aa, Artificial Sequence
  Synthetic
SEVEKLVKDVEDLAREVHKRNKELVDEVRDRVRRVEERNKRVVDEVREEVKKLIDLLRRG

SEQ ID NO: 22978 - protein, 55 aa, Artificial Sequence
  Synthetic
EEAKDRIRELLKRVEESVEKVKRDIERLIERSKESVRRLEERIKELLRELEEAAR

SEQ ID NO: 22979 - protein, 60 aa, Artificial Sequence
  Synthetic
SEVEDLVRKVKKLMEDSDRENKRLVDEVRERVEEVKKRNKEVVDEVRERVKRLEEMLRRG

SEQ ID NO: 22980 - protein, 55 aa, Artificial Sequence
  Synthetic
KDAAEAIKDLIRKSEKSVDEVRREIERLIKESEDSVKRVTDEIRKLLKRLRDTTT

SEQ ID NO: 22981 - protein, 60 aa, Artificial Sequence
  Synthetic
SELEEILKTVKKLVDDHKRLSEEILRRVRKLVEEHKRKSEEILKRVTDLAEDVKDKIRKD

SEQ ID NO: 22982 - protein, 54 aa, Artificial Sequence
  Synthetic
EVEKELDRLLKELERVSRESEKELRRLLKELEEASRESEERLRRLLRDVEEALK

SEQ ID NO: 22983 - protein, 57 aa, Artificial Sequence
  Synthetic
DEIETVKEELKKLLERLEESSRKVERDLEDLLRRSEESTREVEKRLKELLEDVRRKL

SEQ ID NO: 22984 - protein, 56 aa, Artificial Sequence
  Synthetic
VKEVLDRVRELARTHHELNRELLREAEESSREHHRLNEELVDRVRKLVKEVEDRAR

SEQ ID NO: 22985 - protein, 57 aa, Artificial Sequence
  Synthetic
SEIERVKKALRKLLEDSRKSSEDLARELKRLLEESRKSTEKVERDLTDLLREIEEKL

SEQ ID NO: 22986 - protein, 56 aa, Artificial Sequence
  Synthetic
LDTILERVERSSREHHKLNERLLETLRRSSEEHHKRNEELVRRVERLLEEVERRRK

SEQ ID NO: 22987 - protein, 57 aa, Artificial Sequence
  Synthetic
SKIERVKEEIRRLLDTLKKSSETVIREIEKILKESRESSKKVEDDLRRLVREVEKKV

SEQ ID NO: 22988 - protein, 56 aa, Artificial Sequence
  Synthetic
VDKVLRDLEDLVRRHHERNKELLDRVRKSSEEHNRTNEELLKEVERLARKVIKDTT

SEQ ID NO: 22989 - protein, 57 aa, Artificial Sequence
  Synthetic
DEIEEVKRRARELLREATESSKEVAKALDELLERDRDSSRRVKEDLKRLLEEVRRKL

SEQ ID NO: 22990 - protein, 56 aa, Artificial Sequence
  Synthetic
LEKVLRDVEKLMREHHELNRELLKRVEDSSRTSHELNKRLVDTVRKLVTDAAEKAK

SEQ ID NO: 22991 - protein, 57 aa, Artificial Sequence
  Synthetic
SEIEEVDERIKALLKRSTESSKRVEDEARRLMKEDKDSSKEVEDRLRDLLRKVREKL

SEQ ID NO: 22992 - protein, 56 aa, Artificial Sequence
  Synthetic
LKKVLDDLKRSSEEHHRLNEELLKRAEDSSRTSHRLNRKLVEEVRRLVEKVLEEVR

SEQ ID NO: 22993 - protein, 57 aa, Artificial Sequence
  Synthetic
DEIEEVKKTLKKLVEELEESTRRVEEELKKLLKESEDSTRRVEDELRRLLEEVERKL

SEQ ID NO: 22994 - protein, 56 aa, Artificial Sequence
  Synthetic
LDEVLKDVERLVKEHEDLNKELLKKVEKSSRDHHELNKELVRRVEELVREAIKKTT

SEQ ID NO: 22995 - protein, 57 aa, Artificial Sequence
  Synthetic
DEVEKVKEEIRRLLKRLEDSTRDVERRLEELLRESTESSKEVEERLKRLLDEVRKKL

SEQ ID NO: 22996 - protein, 56 aa, Artificial Sequence
  Synthetic
VKKVLEELRELVRKHEELNRKLLEEVRESSERHKKLNKELVDEVKRLAEKITEEAR

SEQ ID NO: 22997 - protein, 57 aa, Artificial Sequence
  Synthetic
KEIEDVKRALEKLLEDDKRSTEELKDRLARLLEDSKRSSDKVIEDLDRLLKEVRDKL

SEQ ID NO: 22998 - protein, 56 aa, Artificial Sequence
  Synthetic
LDEILKRVEDSSRESHKKNEELLRRVRRSSEEHKRLNEELLREVEELVKEIVKEAK

SEQ ID NO: 22999 - protein, 57 aa, Artificial Sequence
  Synthetic
SKIEEVKKALRRLLEDLKRSTDRVKEEAKKLLDESRKSSEEVKRELERLLEEVTRKL

SEQ ID NO: 23000 - protein, 56 aa, Artificial Sequence
  Synthetic
ADKMLRDIERLVEEHKRLNEKLLREVRESSKRHNEKNEELVKTVKKLVEDAEERAK

SEQ ID NO: 23001 - protein, 57 aa, Artificial Sequence
  Synthetic
SEIETVKKELERLLDESRRSTETVEREVEDILRKSTESSEEVKDRLDKLLKEVRDKL

SEQ ID NO: 23002 - protein, 56 aa, Artificial Sequence
  Synthetic
LREVLERVRKSSEDHKELNKELLERLRRSSKEHNDKNKRLVDEVRRLVEEVIRRAT

SEQ ID NO: 23003 - protein, 57 aa, Artificial Sequence
  Synthetic
REIEEVKERLKKLLKDVTDSTDKVRKDLEKLLEDDRRSSRKVEEDLRRLLKDVRDKL

SEQ ID NO: 23004 - protein, 56 aa, Artificial Sequence
  Synthetic
LEKVLREAEKLAREHERTNEKLLKDVEKSSRDSHKRNKEIVDRVKKLAEDIIRKTK

SEQ ID NO: 23005 - protein, 57 aa, Artificial Sequence
  Synthetic
SEIERVKKRLEELLREVEESTRRLEERLKRLLEEAKRSSEEVEKELRRLLEEVRRRL

SEQ ID NO: 23006 - protein, 56 aa, Artificial Sequence
  Synthetic
LDDVLRRVEELAKRAHDENERLIREVEELVRRHNKRNKELVDEVKRLVEKVIEEER

SEQ ID NO: 23007 - protein, 57 aa, Artificial Sequence
  Synthetic
DEIERVKEELERLAKEDKDSTDTVKRELERLLEESKRSSDKLREDVERLLREVRERL

SEQ ID NO: 23008 - protein, 56 aa, Artificial Sequence
  Synthetic
LKRILEEVKRSSEESHKLNEELLDEVRKSSEEHNKLNEKLLRDVERLVRKVLTETK

SEQ ID NO: 23009 - protein, 60 aa, Artificial Sequence
  Synthetic
DELDKLLRDAEEVVRRVKEENKRLVKRDEEVVRRIHELNRKLLEDIRKVVEDVKEEIKEG

SEQ ID NO: 23010 - protein, 62 aa, Artificial Sequence
  Synthetic
EDAKRKVKRVKDELKRLVEEVEEVSRRSEERSRKTLEDVRDSSRRLEEELRKLVKEVEEAVR

SEQ ID NO: 23011 - protein, 60 aa, Artificial Sequence
  Synthetic
DELEKLLEDIRDVVRRIKETLEKLVKEDRDVVEKVKEDNKRLLKEMEDVVRKVKEEIRSG

SEQ ID NO: 23012 - protein, 62 aa, Artificial Sequence
  Synthetic
ERLERRAEEMEERLRRLVEEVREVVERVKEESDRTVEEVRRSSDRVEKEVERLVREVEDKVR

SEQ ID NO: 23013 - protein, 60 aa, Artificial Sequence
  Synthetic
EELERLMRRSEESLKRSEDTVRELIREAREILKRIKEELKRLLEEAERILEEVKKTVRDL

SEQ ID NO: 23014 - protein, 55 aa, Artificial Sequence
  Synthetic
KDLIKTARDTLRESERVSKELEERLKKIVEEVERLVEEVKKELERIVKDAERDVK

SEQ ID NO: 23015 - protein, 60 aa, Artificial Sequence
  Synthetic
DELRKLARDAEEILKRSEEEVRKLKKRSDDSLRRSREEVKKLEDEIREIVDRIKKRVEER

SEQ ID NO: 23016 - protein, 55 aa, Artificial Sequence
  Synthetic
EELKRTLEEIVERSKRVSDRLRERLKRTLDDSRRISDDLRRRLKKLVDDIRREVK

SEQ ID NO: 23017 - protein, 61 aa, Artificial Sequence
  Synthetic
KEIEDVKEELKKVLEEDRDSLRKVEKEHRRLAEEVKRKVRELEESLKRIVEEVERIAREAK

SEQ ID NO: 23018 - protein, 56 aa, Artificial Sequence
  Synthetic
LETVIREVRRILEESKRLNDKSREEVRKLVEELKDIVRRIEETVRRLLEEAKERLR

SEQ ID NO: 23019 - protein, 60 aa, Artificial Sequence
  Synthetic
DSVDRLRRRVDEVLKTVEDALRRNKKDAEDLLRRIEEVLERLERRSEKLLKEIDEVLKRV

SEQ ID NO: 23020 - protein, 59 aa, Artificial Sequence
  Synthetic
DEILTRAVEEIDELLRKLKRELDESTKESRKRVEELEKRLRDNTKRVKKDVDDLKRRVS

SEQ ID NO: 23021 - protein, 57 aa, Artificial Sequence
  Synthetic
SSIERLEEESRKNIKELEDSVKELKEEVDRLVEELERSVRELAKIVEDVVRELKKRA

SEQ ID NO: 23022 - protein, 59 aa, Artificial Sequence
  Synthetic
DEEVKRVLEESHRLVREVHERNKRVAERVRDLVRRVHEENERVAEEIRDLVRRVEEEVR

SEQ ID NO: 23023 - protein, 60 aa, Artificial Sequence
  Synthetic
SEIEDVVKKLRDLSERNVRDIDRLVKEIDELLKRDKEEIKRVVDDIKRRVREIKKIIEED

SEQ ID NO: 23024 - protein, 59 aa, Artificial Sequence
  Synthetic
KEMLDRLRKVVDELVKENKKAVEDLKKRVEDVIRESKRVVEEARRVVDELKKELRDELK

SEQ ID NO: 23025 - protein, 60 aa, Artificial Sequence
  Synthetic
SEIEKLVEEAKRLVKEAEDRLRKLSKESEESVRRVVKTLKDLVRELERLVEEVRKIIERN

SEQ ID NO: 23026 - protein, 62 aa, Artificial Sequence
  Synthetic
DEMRKRVKELEEAVKELTKEIKEVVDRHRETVERSSRKVKTVLDDLRRVVEEILRRVEDAAR

SEQ ID NO: 23027 - protein, 60 aa, Artificial Sequence
  Synthetic
KKIEDLVEEIKRLSDENRRRVERLSEDSKRSLEENKKKLKELVERIKKLLEEVSDKIRKD

SEQ ID NO: 23028 - protein, 62 aa, Artificial Sequence
  Synthetic
EEAEERLRRAEDTVRRLVERNREVLEEHERTLRRSSEESKRALKEVERVVREVLKRVDEELQ

SEQ ID NO: 23029 - protein, 60 aa, Artificial Sequence
  Synthetic
DELEKLVRDLEKRVKEVKDELKRSSEESERSLDEVRKTLKKLVEEMRELLKEVKRIIERN

SEQ ID NO: 23030 - protein, 62 aa, Artificial Sequence
  Synthetic
EEARERLERLRKRVEELLREVEKALEDDEKTVRESSKRIKKVLKELEDTARELVKEVRETAR

SEQ ID NO: 23031 - protein, 60 aa, Artificial Sequence
  Synthetic
SELEKLVRDLERLSEDNKRRLKESSKESKESLDRVRETIKRLVEEAEELLKRVVDTIRRT

SEQ ID NO: 23032 - protein, 62 aa, Artificial Sequence
  Synthetic
EEARERLERLREKVEELARDNERALREDERTVRESSERLRKVLEEAKDRIDKLVKAVEDAAR

SEQ ID NO: 23033 - protein, 60 aa, Artificial Sequence
  Synthetic
SELEKLVEEAKRLSDKNEEDLRRSSRESRESLKENKERIERAVKRLADLVRDVKEKIKRT

SEQ ID NO: 23034 - protein, 62 aa, Artificial Sequence
  Synthetic
EEMKERLERLRDTLKKLKERNKEVLREDRETVTDSSRRSEEVVREAEERVERLLREVEEAAR

SEQ ID NO: 23035 - protein, 60 aa, Artificial Sequence
  Synthetic
DELEKLVRELEELVKRVKEELERSSKESEDSLRDVKKKIEDLERKLDKLLKEVTDEIRRN

SEQ ID NO: 23036 - protein, 62 aa, Artificial Sequence
  Synthetic
DEMRKRLEDLERKVRDLARRVEKALEEDERTVRESSKRIRELLKRLEDKVRKIEKDVDDARR

SEQ ID NO: 23037 - protein, 60 aa, Artificial Sequence
  Synthetic
SELERLVREVRELSDDNRRKLERSSRESERSAKEVERTLEKLVKELRELVERVKRDIERV

SEQ ID NO: 23038 - protein, 62 aa, Artificial Sequence
  Synthetic
EEMKERLKELEKEADDLRRENEELLDRDRRTVEESSKRVEKALRDLEREVRRILREVEETMR

SEQ ID NO: 23039 - protein, 60 aa, Artificial Sequence
  Synthetic
SKLERLVEELKRLSDENVKDLERSSRESEESLKRNKEEIERVVERLRELLEKVVRDIKDD

SEQ ID NO: 23040 - protein, 62 aa, Artificial Sequence
  Synthetic
EEAKERLDRLREAVEKLREDNKRALDRDRETVERSSKKSEDAVRRAEEDVRRLTETVRRAKK

SEQ ID NO: 23041 - protein, 60 aa, Artificial Sequence
  Synthetic
SEIEDLVRKLRELLRDVKKKLKESSKRSEDSLRRVKEEIDKLVEELKKLLDEVKKEIERT

SEQ ID NO: 23042 - protein, 62 aa, Artificial Sequence
  Synthetic
EEAEKKMRELEEEVKKLLEEVDRALKDDERTLRKSSKDIKKVLDDLRRTVKKLKEDVEETMR

SEQ ID NO: 23043 - protein, 60 aa, Artificial Sequence
  Synthetic
DEIERLVEELRKLSERNKRELDRSSEESRESLKRVKEELKKIVEELRRLLEEVKDRIRKD

SEQ ID NO: 23044 - protein, 62 aa, Artificial Sequence
  Synthetic
EEARERAKRLEKEVRDLAKENEKALEEDERTVRRSSEEIADLLRKVEKVVRELLEEVRRAAK

SEQ ID NO: 23045 - protein, 60 aa, Artificial Sequence
  Synthetic
SSLEDLVRRARELSDRNREKLKRSSDESRESLKRNEEEIRRLVEELRELLERVRDLIRKL

SEQ ID NO: 23046 - protein, 62 aa, Artificial Sequence
  Synthetic
EDAKRDLDRLRREVERLIRDNERLAEEDARTVEKSSRDSKKLVEDLEREVEKLRREVERDRK

SEQ ID NO: 23047 - protein, 60 aa, Artificial Sequence
  Synthetic
SSIEDLVRRLRELSKRNTEELKRSSEESEDSVREVEDRVRELVKRLRELLKRVEDLIRKI

SEQ ID NO: 23048 - protein, 62 aa, Artificial Sequence
  Synthetic
EEMEKRAKELEEEVRDLTRRNEDALRRDRDTVKRSTERVDKVLKDLEREVRDIKRRVDEATK

SEQ ID NO: 23049 - protein, 60 aa, Artificial Sequence
  Synthetic
RELDELVKELRKLVEEVKDELRKSSKTSKELVEEIKERLERLVRELKRLVDEVRKTIRRL

SEQ ID NO: 23050 - protein, 62 aa, Artificial Sequence
  Synthetic
EDARRKLEELKETVRELLREVEKALDEDRETVKRSSEEVEEMLKDLRRRVTELDERVEREAT

SEQ ID NO: 23051 - protein, 60 aa, Artificial Sequence
  Synthetic
DEIEKLVEDAERLSRENEKRVRKSSEESKKLVKEALDELKKLVEELEKTVRDVDREIERN

SEQ ID NO: 23052 - protein, 62 aa, Artificial Sequence
  Synthetic
EEAKKRMEDMERRVRELEKRNKKVLDEDRETVRKSSKDLEDAVRELEERVRRLAKKVKESAD

SEQ ID NO: 23053 - protein, 60 aa, Artificial Sequence
  Synthetic
RELEELVKRLRELSRENEERLRRSSDESRKLLERNKERVKKVVDDLRRLVEEVKKEIERD

SEQ ID NO: 23054 - protein, 62 aa, Artificial Sequence
  Synthetic
DDARRRLKELEEEVKRLAKRNEDLLREDERTVRESSRRSEDVVRRAEEMVRRLLEEVERARK

SEQ ID NO: 23055 - protein, 60 aa, Artificial Sequence
  Synthetic
SELEKLVDELRKLSDENRRRLEKSSRDIEKLLKEIRDRIEELKKEIEDLLKEVKERIERL

SEQ ID NO: 23056 - protein, 62 aa, Artificial Sequence
  Synthetic
EEAEELLRRLEKRVEELARENEEMLKRDEDTVEEVRKRVTDVLRELKRVVEEVRRKVEEEAK

SEQ ID NO: 23057 - protein, 60 aa, Artificial Sequence
  Synthetic
SKLEKLVKDAEELSRRNEEELRRSSDESRKLLEKNKRRVERLVEELRKLVKKVRDDIRRE

SEQ ID NO: 23058 - protein, 62 aa, Artificial Sequence
  Synthetic
REAEELLRRLEEMLRRLTKKNRELLRRDEETVRRSSKRSEEVVRRAEEEVERLVKDVEDTRT

SEQ ID NO: 23059 - protein, 57 aa, Artificial Sequence
  Synthetic
KDEERAKKVVEEIKKRVTEIVRRHHKTNEDLVRRVRESSEKHHRRNEELKERVTRKI

SEQ ID NO: 23060 - protein, 56 aa, Artificial Sequence
  Synthetic
IETLVRELEELLKRLEDEVRRLTKRSKEVIDRIHKLNEDLTRESERVLKEVEDRDR

SEQ ID NO: 23061 - protein, 57 aa, Artificial Sequence
  Synthetic
RETEEVKKELDKLVEEAERAVREHHKENDRLVKRLEEVIRRHEKSVRELVEKVRREV

SEQ ID NO: 23062 - protein, 56 aa, Artificial Sequence
  Synthetic
LEKIVRRARELVERLKERLKELTRRSEELVKDLERKIERLSRELARIVKEVLDRDK

SEQ ID NO: 23063 - protein, 57 aa, Artificial Sequence
  Synthetic
SREEEAKKRLEELLREVEKVVRDHHRENEKIREEVERVVEKHKKRNRELVEAVRKRI

SEQ ID NO: 23064 - protein, 56 aa, Artificial Sequence
  Synthetic
VREAVERLKEIVERVRRKVEKLTEDSRRVLEELKRRIEKLTRDSERVLKEIEDRTR

SEQ ID NO: 23065 - protein, 57 aa, Artificial Sequence
  Synthetic
SDKEEVKKEIKKLKEDIKRAVDEHRKVNKRILEEAEKSSREHEKENRDIVRRVREEV

SEQ ID NO: 23066 - protein, 56 aa, Artificial Sequence
  Synthetic
IKEVVKELKKILEKLKRELEDLSRKSEDVLRRLHELNKRLTDDSRRVLDEVREDTK

SEQ ID NO: 23067 - protein, 59 aa, Artificial Sequence
  Synthetic
SEVDRLLKELEDVLKKVEDDIRRHIKRNEDILRESKKLADKLITEIEDMLRKVEEMIRN

SEQ ID NO: 23068 - protein, 59 aa, Artificial Sequence
  Synthetic
EEAVKRLEDTARRVEEEVRRLIRELEDTSRRVLEESRKISKELDERLRRVIEEVEKAAK

SEQ ID NO: 23069 - protein, 59 aa, Artificial Sequence
  Synthetic
SELEKLIKEIRDILKESEDAIKENLDRNEEALKRVAEEIKRLIDELRKMLEDVKRMIRD

SEQ ID NO: 23070 - protein, 59 aa, Artificial Sequence
  Synthetic
RRAVERVREELEKVIRDSRKLSRDLEEASRRVEEDVRRLIEELERRLKEVIKAVEDAAR

SEQ ID NO: 23071 - protein, 59 aa, Artificial Sequence
  Synthetic
DEVEKLAEELREILKRSEEMIRENLKRNRDLLRRSKEEVDKLKDELEEMLRRVRRVIED

SEQ ID NO: 23072 - protein, 59 aa, Artificial Sequence
  Synthetic
RELVKDLERKAREVIRTSEELSRRLAKTSEEVLEESERVVEELERRAERVEEEITKAAK

SEQ ID NO: 23073 - protein, 59 aa, Artificial Sequence
  Synthetic
SEVEDLLRKLEEILRRSKENVERNVRENREMLKKVEKTIRDLIRRAEKLLREVEEAIRN

SEQ ID NO: 23074 - protein, 59 aa, Artificial Sequence
  Synthetic
EDAVRRLEKELERVIKTSRDISERLERESRRVEEEVRKLIEELSRRLEEVRERVKEATR

SEQ ID NO: 23075 - protein, 59 aa, Artificial Sequence
  Synthetic
REVEEALKDLERILKESEDNVRRNIKKNEDLLRRVEERIRELLDEARRLLERVKEVKKD

SEQ ID NO: 23076 - protein, 59 aa, Artificial Sequence
  Synthetic
KDLVERLKEELERVTRDSRRVVDELRKRSEKVREDVRRLIEDLRRRLEKVIRDVEEDAR

SEQ ID NO: 23077 - protein, 59 aa, Artificial Sequence
  Synthetic
DETERIIRDLERVLEEIARLAKKNIDDSRRVLKELAEKLKRDSERAKKLLEDVEEIIRR

SEQ ID NO: 23078 - protein, 55 aa, Artificial Sequence
  Synthetic
EDVDRVVRKVLEDLRRLLEEVKKVNDDSEKEVRRLLEENERKNRRVEEEVKKLLK

SEQ ID NO: 23079 - protein, 60 aa, Artificial Sequence
  Synthetic
SELEDIIRRIEEVLKRNEELNRKNIKESRDLLEEIRRKAKEDSDRVKEVLRRLEDEVRRN

SEQ ID NO: 23080 - protein, 55 aa, Artificial Sequence
  Synthetic
EEVKRKVDKVVEDIKRVSEESTRANDESRRALEKVVKENEDTNREVVKRVRDAEK

SEQ ID NO: 23081 - protein, 59 aa, Artificial Sequence
  Synthetic
SELEEIIDRIRTVLERNRELNERNIRESKRLLDEIKKRVEDDNERSKDIVRRVETEVRE

SEQ ID NO: 23082 - protein, 55 aa, Artificial Sequence
  Synthetic
ERVDEVVEKVLDEMRKVSRTSEESNRKSEEEVRKVLKENNDMNRESVERLRRTEE

SEQ ID NO: 23083 - protein, 60 aa, Artificial Sequence
  Synthetic
DEVRRVIEELERLLEENRRHSKEDNERSKKINKENHDHSKESTDRAEKLLREVEKLIRET

SEQ ID NO: 23084 - protein, 58 aa, Artificial Sequence
  Synthetic
DRVRDVDRTVKRVVKESRRSTRENEKTNTDVVRSTDESLKEDKKEVDRVIEELDRAVR

SEQ ID NO: 23085 - protein, 60 aa, Artificial Sequence
  Synthetic
SEAEKVIEDAKRLLKENEDHSKEDNDRVRELLEEVKRHSEESTRRAEKILEEIRELVEKV

SEQ ID NO: 23086 - protein, 58 aa, Artificial Sequence
  Synthetic
EEVKRVEDEVRKLVKASRESTERNERTNREVAERLKKSLEEDRERVRKVVEDLRRAEK

SEQ ID NO: 23087 - protein, 57 aa, Artificial Sequence
  Synthetic
DELRKVLKESEDSLERLRRTLEESIKRSRDSLRENTELVKDSLRRSEESLERVEKSN

SEQ ID NO: 23088 - protein, 59 aa, Artificial Sequence
  Synthetic
KEMLKRLEDEIRRSIEELRKALRRVEEEHRKVIEASKDLVRRLEEAHKEVIDRLKEKLR

SEQ ID NO: 23089 - protein, 55 aa, Artificial Sequence
  Synthetic
DEIERVIEESRKSLDDLRRKAEESIRRSEESLREVEERLKRSIREAEESLKKVEN

SEQ ID NO: 23090 - protein, 59 aa, Artificial Sequence
  Synthetic
DEVVRELKKMIDKSERDLEELLDRVRRKHERVIEELKKLLKRVKDAHERVIRELEKTRK

SEQ ID NO: 23091 - protein, 59 aa, Artificial Sequence
  Synthetic
SEVEDLIRRVRKSNKESEDVLRESIERSEESNERSERTARRIIEEAERILEEMEESLKK

SEQ ID NO: 23092 - protein, 59 aa, Artificial Sequence
  Synthetic
EEVVRRLEEEVKRVAEHTRKLLKDVRKKHEESIRHSEEVLDRLEKKLREIMKRVTERTK

SEQ ID NO: 23093 - protein, 59 aa, Artificial Sequence
  Synthetic
KEVEDIIEDVKRSLEESKRMADKSITDSRRSNEESKRIVEEIKRKIDEILERIERKARK

SEQ ID NO: 23094 - protein, 59 aa, Artificial Sequence
  Synthetic
EKVVRELEKRVKEVVKTTEDVLREVERTHRESIKHSEDLVRRLEERLRRVAKEVERTRK

SEQ ID NO: 23095 - protein, 59 aa, Artificial Sequence
  Synthetic
SEVEKAIKEARDSLRESKRLLEESIKRSEDSLEESRRVVEEIKKRLEELLREVKESVDQ

SEQ ID NO: 23096 - protein, 59 aa, Artificial Sequence
  Synthetic
EKKVRDLERMVKRVMEETEKALEDVERRHEKSIRDTRRVLKELEDTVRKVLKEVDRERQ

SEQ ID NO: 23097 - protein, 59 aa, Artificial Sequence
  Synthetic
SKLEKVITEVRDSLRRSRKMAEDSIRRSEELLKELEDLLKKVRDTLRKILKDIEDLARK

SEQ ID NO: 23098 - protein, 59 aa, Artificial Sequence
  Synthetic
KELVDDVRREVEKVVEDTRRVLEEVERTHKESIDRLRKLVERVRREIEEIARRVKETRD

SEQ ID NO: 23099 - protein, 60 aa, Artificial Sequence
  Synthetic
SVVEKLKDEADKLVKRNEDLARRLEEVSKDTIDRLEDVLRKLREVLKRLRRRLEEVLKRV

SEQ ID NO: 23100 - protein, 59 aa, Artificial Sequence
  Synthetic
REKFEEVIKRLRDSSKRSEDKIRKVLKDSRDLLEDVRRKIEDVIRRMEKLIKEVEDRVR

SEQ ID NO: 23101 - protein, 60 aa, Artificial Sequence
  Synthetic
SVVEELERVMRELKKRNEELSRENHESVKEAEKRNKRLSEELEKVSRDVIKDLERVVEEV

SEQ ID NO: 23102 - protein, 59 aa, Artificial Sequence
  Synthetic
EREIRRIIEELKRLSDENEERIRRISEEIKDLSRRNEETVRRVIEENRKLLEDATRRTK

SEQ ID NO: 23103 - protein, 60 aa, Artificial Sequence
  Synthetic
SLREKLKEVIRRLEEENRRVSEENHRSVREVEEENRKVSDELRKVAEELKRRLEEVVRRV

SEQ ID NO: 23104 - protein, 59 aa, Artificial Sequence
  Synthetic
SREIEDIIRRVKKLSKENKETIERISREIRELSKRNEEEVRRVIRRLEELLEELERTAK

SEQ ID NO: 23105 - protein, 60 aa, Artificial Sequence
  Synthetic
RVIEKAEEVVDRLKKRNKEVLKENHDSVREVEKENRELLEKAEKVVRELEERLKEVVEEV

SEQ ID NO: 23106 - protein, 59 aa, Artificial Sequence
  Synthetic
EREIERIIKEAEELSKRNEEVIDEISKRIKELSERNRERVEKVIEEAKELVKRVTDKVK

SEQ ID NO: 23107 - protein, 60 aa, Artificial Sequence
  Synthetic
KDEEKAEDVVRRLTEEVRRVHEKTRDVVRRVTERSNDVSRRSKEEVRELLERADDLARKG

SEQ ID NO: 23108 - protein, 56 aa, Artificial Sequence
  Synthetic
VEDLIRELKRLVDELRERSEDLIRKAERVLERLEEESRRLLKELRDLLEDVTRKAE

SEQ ID NO: 23109 - protein, 60 aa, Artificial Sequence
  Synthetic
SETEKAREVVRELEKRNDEVHKETRDVVRRLEETSDEVSKDSERKVDRLREEVKKVRDDG

SEQ ID NO: 23110 - protein, 56 aa, Artificial Sequence
  Synthetic
VEELIRRMEKLTEDNERRSRKLIEELKRLLEDLREKSERLIRELERLVKELRDRAE

SEQ ID NO: 23111 - protein, 60 aa, Artificial Sequence
  Synthetic
SEKEKAREVVKKLKKRVDEAHKKTKDVVEELRKRNRDVHRTTREVVRDLLKKVKDVERRG

SEQ ID NO: 23112 - protein, 56 aa, Artificial Sequence
  Synthetic
VETLIERLRELIDELRRRSEKLIKELREVTKRNKERSDRLIKELEDLVKKLKDDAT

SEQ ID NO: 23113 - protein, 59 aa, Artificial Sequence
  Synthetic
DEVEKLIEDLKRIVERDEREIRELIKELDDHVRKDEKIARDLERRLKEILDEVRKMVTD

SEQ ID NO: 23114 - protein, 59 aa, Artificial Sequence
  Synthetic
KELLEKVKRVLEEVRRRSRETLERLREVLERSIRDSERTLEKVREMLERVRKEIEKLRK

SEQ ID NO: 23115 - protein, 59 aa, Artificial Sequence
  Synthetic
SEVEELDKRLRDHVRRDEEIVERLIRELKRHVERDREEARRLIEELRRLLEEVKRMMED

SEQ ID NO: 23116 - protein, 59 aa, Artificial Sequence
  Synthetic
RKLVRDVEKSLEESIRRSEETLKTVKDVLDKSKEDSKRTVEDVERVLREAEKEAKRATD

SEQ ID NO: 23117 - protein, 59 aa, Artificial Sequence
  Synthetic
SEAEKLIKELEDHVKRVEDRARELIDELRKHVEEDERRARKLIEELRRLLKEVKRMVDD

SEQ ID NO: 23118 - protein, 59 aa, Artificial Sequence
  Synthetic
EDLVRRVRKVLRRSEEDVRRLIEEVERVLKRSEEESRRTIREVEEVLKEVERAVEELAR

SEQ ID NO: 23119 - protein, 60 aa, Artificial Sequence
  Synthetic
SLEDRVREVVERSERDLRRSTDEIRRVVEEAEKALRRLVREVEEVVREVKERLERVVREG

SEQ ID NO: 23120 - protein, 59 aa, Artificial Sequence
  Synthetic
EDTVRKVIEDSDRSLEENKRLVKKVIDEIKERLKEMKKRAEEIIERLKKLLEEVEERAR

SEQ ID NO: 23121 - protein, 60 aa, Artificial Sequence
  Synthetic
DLTKRVEEVVRRSRERLERSTRDIKRKAEEVKERLKKSSKEVEKVIREVETELERLRREG

SEQ ID NO: 23122 - protein, 59 aa, Artificial Sequence
  Synthetic
EKKVEEVLRRSEKSVRDNKKRVEEVAETLKKILTDNRRLVKRVKEELDKLIRDVEERAR

SEQ ID NO: 23123 - protein, 57 aa, Artificial Sequence
  Synthetic
SEKEDVERVVERVKREADELLKENHKSVKDVDERVKETVERNHRSVRKAEEDVKRVE

SEQ ID NO: 23124 - protein, 56 aa, Artificial Sequence
  Synthetic
VREVAKELEDIVRRIKELVERSNRELKKIVEDNERVVEESDRRIKEILERITEASR

SEQ ID NO: 23125 - protein, 57 aa, Artificial Sequence
  Synthetic
SEKETVEEVVDKVRRDLDKSLEDNHKSVEEVRRRVEKTLRENHESVERARKRARDLE

SEQ ID NO: 23126 - protein, 56 aa, Artificial Sequence
  Synthetic
VREVVERAKRILEDNKKKIDESNERLERIVRENKEMVERSDRRIEEIVERIERETR

SEQ ID NO: 23127 - protein, 57 aa, Artificial Sequence
  Synthetic
DEKEEVEKRAEEVRKKVDKLLKENHESVEDARRRVDKTLRENHESVEEVKRRVDEVR

SEQ ID NO: 23128 - protein, 56 aa, Artificial Sequence
  Synthetic
AEDVMEELDRLVEDLRRKVEDSNRKIKRIVDENKREVEKSNRKLRELLKELEDRAR

SEQ ID NO: 23129 - protein, 57 aa, Artificial Sequence
  Synthetic
SKKEDAERVVREVTREVRRLLKENHDSVREVLKRVDETVERNSRSVKEVLRKVREVE

SEQ ID NO: 23130 - protein, 56 aa, Artificial Sequence
  Synthetic
LKEVVDRARDLIRDLTRKVKESNERLEEIVERNEREVRKSDEDLKRLADDLERKAT

SEQ ID NO: 23131 - protein, 57 aa, Artificial Sequence
  Synthetic
REKEEVERVVEDVRRRLDESLERNHKSVRDALREVDRTVEENSRSVEKVRKRLKEVE

SEQ ID NO: 23132 - protein, 56 aa, Artificial Sequence
  Synthetic
VREVKKELEKIVRDNERVVEDSNDKIRRIVTKNTEDVKRSDETLERIVEEIERRAR

SEQ ID NO: 23133 - protein, 57 aa, Artificial Sequence
  Synthetic
KEKEDVERKVEDVKRDVDRVLEENHRSLKEAEERSNKLSDTSRRVAKRVVDDVRRLK

SEQ ID NO: 23134 - protein, 56 aa, Artificial Sequence
  Synthetic
VKEVVDRLEKIVRDIRKEIERSNRDVERLVRTLEEVSKRIIDTLERIIDKIREDTK

SEQ ID NO: 23135 - protein, 59 aa, Artificial Sequence
  Synthetic
SEAEELIEELERIAEEDRKLVEDSIRKLRKILDEDRKIMKRLAEELDRILEDVKRKVDK

SEQ ID NO: 23136 - protein, 55 aa, Artificial Sequence
  Synthetic
KELEEVVRKVKRESDRTLEKSKKVVDEVRRRSEETLEKLRRVVERVRKRVDEASK

SEQ ID NO: 23137 - protein, 60 aa, Artificial Sequence
  Synthetic
DRADELRERLKEIMERDRRIMKELEDELRELVERDERIIRELERRLEEIVKDVERKAKSG

SEQ ID NO: 23138 - protein, 55 aa, Artificial Sequence
  Synthetic
DELRRVVEEVEKDSERTLKELRRVVKEVEERVEKTLRDLEEVLERVKERVKRLKD

SEQ ID NO: 23139 - protein, 59 aa, Artificial Sequence
  Synthetic
KEAEDLMREVEELVRRDEEIIKRLADELEEIVDDNRRKVEDLVRRLEEILRRVEESMRK

SEQ ID NO: 23140 - protein, 55 aa, Artificial Sequence
  Synthetic
KELREVIERARKRVEETLRELERKLEEVRKTSEDLLRRLEEVVKRVKEEVEKLEK

SEQ ID NO: 23141 - protein, 59 aa, Artificial Sequence
  Synthetic
SEMDELRKELEDLARDDKRRVEESIRRLEKIAEDNERLARESIKRLRRLVTELEKLARK

SEQ ID NO: 23142 - protein, 55 aa, Artificial Sequence
  Synthetic
KELKEVVDRVREIVKKTLEESREVVKKVREDSKRLLEESKRVVEEVKKRVEELKK

SEQ ID NO: 23143 - protein, 59 aa, Artificial Sequence
  Synthetic
DEVEEVKEELKRTSRDDERKVEEIRKRLEESTRRLRELAEELKDELRKSSRDLERLRRE

SEQ ID NO: 23144 - protein, 55 aa, Artificial Sequence
  Synthetic
REVERALERSLKRSDETVKEVEELLRRSLEDSKKLLEEVREALERSKKRSDELRR

SEQ ID NO: 23145 - protein, 59 aa, Artificial Sequence
  Synthetic
KEVEDVKEELRRSSKKLRELAERLKKLLEDILDEDRKLAEEIKKRLEDSSRKIEELKRR

SEQ ID NO: 23146 - protein, 55 aa, Artificial Sequence
  Synthetic
DEVERMLKESDKESKRLLEEVDRMLKEVIKASKKSLDDVDRVLRRSERESEKRRK

SEQ ID NO: 23147 - protein, 59 aa, Artificial Sequence
  Synthetic
SEVEKVKEELRESSRALRKLVEKIRRILRETSERDRDTVREIADRLRKSSRRVEELKRN

SEQ ID NO: 23148 - protein, 55 aa, Artificial Sequence
  Synthetic
DEVRRVLEESERRSKKLLDEVEELLRRSERTSRESLKEVKERLRKSLEESERRAR

SEQ ID NO: 23149 - protein, 60 aa, Artificial Sequence
  Synthetic
SLVERLKKVVEDAERELRRLTKETEDVLREAEETIKRLSERLKKANEDTERKIRRLAKEN

SEQ ID NO: 23150 - protein, 59 aa, Artificial Sequence
  Synthetic
EKKIDDAIKRIRDLIERVEEINKEVVDRIKELIERVEEINETVIRDSERLIKEVEDEVR

SEQ ID NO: 23151 - protein, 60 aa, Artificial Sequence
  Synthetic
SLEEDLRRVLEEVKRELKELSKRSKEVNRKTEETARRLSEKSEKVNRETKKRVEDLMREN

SEQ ID NO: 23152 - protein, 59 aa, Artificial Sequence
  Synthetic
EKAIRDAIRRLKELVERVKRTNEEVVKESEELIERVRERNDDAVRKSRRLIERLTEKVK

SEQ ID NO: 23153 - protein, 60 aa, Artificial Sequence
  Synthetic
SLKETLEEVLKEVKRRIEDLSRRLEEVLRRAREELKRLSDDSRRVVEEAEERVRRLMEEN

SEQ ID NO: 23154 - protein, 59 aa, Artificial Sequence
  Synthetic
KEEIKRVIDELRRLIEEVEKRNREVVEEIKRLIKEVADDNRRALERIRRLIRKLEEEVK

SEQ ID NO: 23155 - protein, 60 aa, Artificial Sequence
  Synthetic
SLTERLREVLKKVEDTLRKLSERLRDVLRKAEKTIEEISRRSEEANRETKERAERLMEEN

SEQ ID NO: 23156 - protein, 59 aa, Artificial Sequence
  Synthetic
KDRIEDVIRELDRLLEEVRRINEEVLRRIEELIKRVKEENDRVMETSRRLIETVKEEVK

SEQ ID NO: 23157 - protein, 60 aa, Artificial Sequence
  Synthetic
DKVRKILKEMRDLVRRNKEEIDRSIRKIEELIERNKREIDKSIEELKRLLDEVRKIVKDE

SEQ ID NO: 23158 - protein, 58 aa, Artificial Sequence
  Synthetic
EMVRDVARVVKEVHDDNRRLTEKSERVVREAHRRNEEIVKASEEAVREAKRRLEELRR

SEQ ID NO: 23159 - protein, 60 aa, Artificial Sequence
  Synthetic
DKVREILKRLEDLVRTNKERIDESIEELERLADENRRRIKKSIDDLRRLIEEVERIVKDR

SEQ ID NO: 23160 - protein, 58 aa, Artificial Sequence
  Synthetic
EVVRDVERVLEEVDRANRDLVRRSKEVVDKVHETNKKLVEESKEAVDRVTELLERARK

SEQ ID NO: 23161 - protein, 59 aa, Artificial Sequence
  Synthetic
DEVEELVKKLEKVLREIEEMSERLSDENRKVLEKIKEDSKRLNEELERVLRRIREASRD

SEQ ID NO: 23162 - protein, 59 aa, Artificial Sequence
  Synthetic
SELLERLREVLEDVKRKLDEIHRRNEESLERLEREVKRLNEDNRRSLKTVDDRLRETKR

SEQ ID NO: 23163 - protein, 60 aa, Artificial Sequence
  Synthetic
SEKEKLDAVLREVEEAAKKNIDKNRRSLEEVAEVVRELVKENRKSLEEVKEMIERIIREI

SEQ ID NO: 23164 - protein, 56 aa, Artificial Sequence
  Synthetic
VEKIVEDLKRVLEESHKLSEDVDRLIKRVVEEAKKLSRDVNEDVKRVVKEVKDEAD

SEQ ID NO: 23165 - protein, 60 aa, Artificial Sequence
  Synthetic
SEKEKLDDVLRKVKDTLAENIKNNKESLDRVREEIERNIRRNEESLDRARRTVEKIIEEI

SEQ ID NO: 23166 - protein, 56 aa, Artificial Sequence
  Synthetic
VEKLVEELRRLLKESHELSREVNDRLRRALEESHELSKEVNETLRKLLEDIRREAK

SEQ ID NO: 23167 - protein, 60 aa, Artificial Sequence
  Synthetic
KDEERLKKVIDEVRKRVEENIRTNEDSLRKAEETLKRNIRKNEKSLEDARREIEELIREI

SEQ ID NO: 23168 - protein, 56 aa, Artificial Sequence
  Synthetic
VEKLIKKLRDLLEESHRLSEEVNRTLKRALDESHERSKEVDKRIEEMVERVRRKVK

SEQ ID NO: 23169 - protein, 60 aa, Artificial Sequence
  Synthetic
SEREKLEKVLEEARREIERLAEENRRSLDRARKEVKRLIDNNRKSLDDVRKRVDKLVKDI

SEQ ID NO: 23170 - protein, 56 aa, Artificial Sequence
  Synthetic
VEKLVEELKKVLDDVRKESERVNRTLKKLLEDIERLSREVNKRIKEMVRKATEDVR

SEQ ID NO: 23171 - protein, 60 aa, Artificial Sequence
  Synthetic
SEKEELDKVLKEAEDKIEENIRDNERSLRDVERAVRRIIENNRESLEELDKAVKEIVRRI

SEQ ID NO: 23172 - protein, 57 aa, Artificial Sequence
  Synthetic
DVKTLVEELRRALEESHKLSEDVNRALKKVLEEIADLSRKVNDKLRELLKRLEEEAR

SEQ ID NO: 23173 - protein, 60 aa, Artificial Sequence
  Synthetic
SKEEKLDKKLKEAERTIRENIKENRESLERARKTLEENIRNNEDSLRRVEEEVRRIIEEI

SEQ ID NO: 23174 - protein, 56 aa, Artificial Sequence
  Synthetic
VDDILRRIEEILRRSHRLSKEVNKRIKELLDRSHELSKRVNDELDKVLKEIRREAK

SEQ ID NO: 23175 - protein, 60 aa, Artificial Sequence
  Synthetic
DEDEELKKVLDRAKKRVDELVRNNEESLERVKRAVDRLIEKNERSLERAEDELRKLVKEI

SEQ ID NO: 23176 - protein, 56 aa, Artificial Sequence
  Synthetic
VEKLKKELDDMLRKLEELSRRVNRTLEELLRRIEELSREVDERIKKVLKEIKDRVK

SEQ ID NO: 23177 - protein, 60 aa, Artificial Sequence
  Synthetic
SEKEELDDVLRRVEEKVRRNVRKNEDSLKKVEDEVRRNIRNNEKSLEDAERDVRKLAKDV

SEQ ID NO: 23178 - protein, 56 aa, Artificial Sequence
  Synthetic
VKKLLKELEDLARESHKLSRDVDRKLEDALRRSHRLSREVNRKIEEMVRKLREDTR

SEQ ID NO: 23179 - protein, 60 aa, Artificial Sequence
  Synthetic
KEEERVTDALRRVRETAKKNIEYNRRSVERVERTLKELVKNNTRSLERVRKAVKELVERI

SEQ ID NO: 23180 - protein, 56 aa, Artificial Sequence
  Synthetic
VDKLIERLERVLEKSHRDLRRNSKDNKRILDEIKKESEEVNRRLEEVLRKIKEDVE

SEQ ID NO: 23181 - protein, 61 aa, Artificial Sequence
  Synthetic
DKVRELEKTLRDLLRENHRISEDLNKKLKDMARRNKKHSEDVIEKIKRLLDRLREIVKRDG

SEQ ID NO: 23182 - protein, 59 aa, Artificial Sequence
  Synthetic
DELVRRVREVLREVEERLRDNIKDNRRSLDDHRRVIEETRRESKRAVERAEDEVKKLED

SEQ ID NO: 23183 - protein, 61 aa, Artificial Sequence
  Synthetic
SKVEDLIRRLKTLLDDLRRISREVDEKIKEILKEVERHSKEVIDRIKDILRRVEEIVRRKG

SEQ ID NO: 23184 - protein, 59 aa, Artificial Sequence
  Synthetic
KRLVERVEKVAREVEEAVRKLIEKNKESVERAEETARRLIERSKRAVDEARRKIEELRR

SEQ ID NO: 23185 - protein, 61 aa, Artificial Sequence
  Synthetic
SKVEELIERIERLLEEVRRISDKVDEDLERLIRENEKHSKKIIKELEKLLKELEDIVRREG

SEQ ID NO: 23186 - protein, 59 aa, Artificial Sequence
  Synthetic
KRLVERLRKVVEDAEREIRRLIEKNKRSLERHKRELERTIKESRDVLKKVEDRVRELAR

SEQ ID NO: 23187 - protein, 61 aa, Artificial Sequence
  Synthetic
SKVEDLERRIRKILREVEEISERVNRALKRLLDENRKHSEKIIRELEELLRRLEEEVRTKG

SEQ ID NO: 23188 - protein, 59 aa, Artificial Sequence
  Synthetic
KSLVDRVRKAVEEAEERIRRLIENNERSLRRHEEAIKKTIEESDKVLEDVRRRAEELLK

SEQ ID NO: 23189 - protein, 61 aa, Artificial Sequence
  Synthetic
SKVERLIERLKELLDENHKISERVNKELERLARENDKHSKDLIRDIERILREVEEIVRRDG

SEQ ID NO: 23190 - protein, 59 aa, Artificial Sequence
  Synthetic
RRLVEEVRRVLREVREAAKENIRNNRESLKRHKDALRKTIEDSARVVKRAEERIRELER

SEQ ID NO: 23191 - protein, 61 aa, Artificial Sequence
  Synthetic
SKVDELVERIERLLRELTKHSKEIIDRLKKLLEDNERINRDVIRRIEEILKEVKRIVERDG

SEQ ID NO: 23192 - protein, 59 aa, Artificial Sequence
  Synthetic
EELVRKVREVVDRARERVEELIRRTEDVLKKHREELKKLIEESRRVLEEAKKTADELKK

SEQ ID NO: 23193 - protein, 61 aa, Artificial Sequence
  Synthetic
DEVRKLKEDLRRLLKENKEKVEKVIRENEKLLRENKKMVEDAERDLRRLLKELEDLVRKRG

SEQ ID NO: 23194 - protein, 59 aa, Artificial Sequence
  Synthetic
KELVDEVRRVARRVKEENKRLLDEVRKVSEEVERTNRELVRRVEEVVREVRERIDELLR

SEQ ID NO: 23195 - protein, 61 aa, Artificial Sequence
  Synthetic
SEAEDLERRIEKLLEDNTRLVERVIEENEKLLRDNAEHSKEVEDRLRDLLRRLEEVVRKRG

SEQ ID NO: 23196 - protein, 59 aa, Artificial Sequence
  Synthetic
EELIKRVEEVVRKAKKTNEDLLREVEKVSREVKKANEDLLRRSKEVVDEVEKDIERLKR

SEQ ID NO: 23197 - protein, 61 aa, Artificial Sequence
  Synthetic
DDIERIIEKLKELLERNKRHTEEVIKELERLLRENERHSREVKKRLEELLKRLEDVVRREG

SEQ ID NO: 23198 - protein, 59 aa, Artificial Sequence
  Synthetic
EEVIRRIEEAVREVKEANKDLVRESRRVARRVEEENKRLVEESRRVVEKVEKRIRDLLR

SEQ ID NO: 23199 - protein, 61 aa, Artificial Sequence
  Synthetic
DEIDEARKELEEILRENREKVDEVRKRLEKLLRENEEVVKEIIRRLKELLKELERVMREEG

SEQ ID NO: 23200 - protein, 59 aa, Artificial Sequence
  Synthetic
EKLVREVRKDAERAERELRRSVEDIRRVVERVKRENERLLREVEKVVEEVKEELRKIET

SEQ ID NO: 23201 - protein, 61 aa, Artificial Sequence
  Synthetic
DEIERVIEELKKRLDENRRVLEEIIRRLEELAKRNKRHSEELEKRLREELDKVRKRLEETG

SEQ ID NO: 23202 - protein, 59 aa, Artificial Sequence
  Synthetic
RELIERMREVVEEVERALRKSLKDVEDVVREVEKKNKELLEKSKKVVEDVRRTLEKLRE

SEQ ID NO: 23203 - protein, 61 aa, Artificial Sequence
  Synthetic
SEVEEAIKTLKKLLDDNKRHTEEVIRRIEELLKRNEEHSRKVIEDLERLLRKLEKMVRDRG

SEQ ID NO: 23204 - protein, 59 aa, Artificial Sequence
  Synthetic
EEVVRRMEEAVRRAEETNKDLVRRSREVVRRANETNKKLLEDSKRVVERVEKRLEELLR

SEQ ID NO: 23205 - protein, 61 aa, Artificial Sequence
  Synthetic
SELEEIERELEELLRENKKLVDRVREELKKLLDELRKHSERVIREIERLLEELERVVRKRG

SEQ ID NO: 23206 - protein, 59 aa, Artificial Sequence
  Synthetic
EELIKRLTDVVRKVKEDNKRLVEEARRVVEEVKREIKRLLEESREVVRRAERRLEELRR

SEQ ID NO: 23207 - protein, 61 aa, Artificial Sequence
  Synthetic
SEIEDAERKLKKLLEDNTDMARRLIERLRKILEENKRHSERVKRELEEILKELEDLLRRKG

SEQ ID NO: 23208 - protein, 59 aa, Artificial Sequence
  Synthetic
EELVKRVEDVVRKVDEDNKRLVEEVRRVVEEVRKTLEDSLRESERVVREVKKRLEDLKR

SEQ ID NO: 23209 - protein, 60 aa, Artificial Sequence
  Synthetic
SEREKMEKVVREAKKDLDRSLKRVKEVAEEVKKELDRSLEEVKRVSEENKKEVDRIRKKG

SEQ ID NO: 23210 - protein, 56 aa, Artificial Sequence
  Synthetic
VDTLVRRLEKILEENRRIVKEIEDRLRKLLEDNKRVVDEIIKRNEDSVRDVERRAK

SEQ ID NO: 23211 - protein, 59 aa, Artificial Sequence
  Synthetic
SEREKVEEVVREAKERLDESVKRVEEVSRENKKEIDRLLEEVKKVIEEAKRRLEELRRR

SEQ ID NO: 23212 - protein, 56 aa, Artificial Sequence
  Synthetic
VDEVLKELRRILRDNERMVKEVIERNRKSVEDLERIARRIIEEIERLLKELTDRAR

SEQ ID NO: 23213 - protein, 60 aa, Artificial Sequence
  Synthetic
SEDEEVEEAADRHRRSVEDSSRDLKKVLDEDRRTVAESSRKLKEILREVEREVKRVEDDG

SEQ ID NO: 23214 - protein, 56 aa, Artificial Sequence
  Synthetic
VEELKKRLKELSDESRKSLERVKRKLEETSRRSEESLRRVKKDAERLVREIEKRAK

SEQ ID NO: 23215 - protein, 60 aa, Artificial Sequence
  Synthetic
SEDEKVKKVLDDVRRKAEDSSRRITEVLRRHEETVRRSSEKLKKLLDELREDADRVRRAG

SEQ ID NO: 23216 - protein, 56 aa, Artificial Sequence
  Synthetic
VKDLERKARDIVRKSEESLERVVRELERLSRDSERSLKKVKEDLERVVEEIRRRAD

SEQ ID NO: 23217 - protein, 59 aa, Artificial Sequence
  Synthetic
SEDEEVEKVLREDEESVKRSSDEIRKLLEDHERTVRESSDELKKALDEVRKRLDELKRR

SEQ ID NO: 23218 - protein, 56 aa, Artificial Sequence
  Synthetic
VEDLKREAERTSEESRRSLEEVRRRLEELSERSRESLKRVKDELKRVVEEIEERAR

SEQ ID NO: 23219 - protein, 60 aa, Artificial Sequence
  Synthetic
SEDEEVKRVLDELRKRLKESSDRLREVLKRDKRTLEKSSEDIDRALKKVERALTEVLKEG

SEQ ID NO: 23220 - protein, 56 aa, Artificial Sequence
  Synthetic
VKELLDTLRKLVEESEESLREVVERLDKTSEDSKESLRRVIETLDRLVKDIDEKAK

SEQ ID NO: 23221 - protein, 59 aa, Artificial Sequence
  Synthetic
SELEKLKKEIDDLSRDLDRILKELKKRVEELTRRSEKVLEDLRKTLEDIVKTLEDLARG

SEQ ID NO: 23222 - protein, 59 aa, Artificial Sequence
  Synthetic
SELVKRAADVVEKHRRSLERLLRTVTKIVKDHHERNEEIVDEVRKVVERAKERLEEIRK

SEQ ID NO: 23223 - protein, 59 aa, Artificial Sequence
  Synthetic
SEVDELRRRVKKLSDDSKRVLDELSRRLKELSERLAEIVKEVHRRNEELVDRLRRLKDK

SEQ ID NO: 23224 - protein, 59 aa, Artificial Sequence
  Synthetic
SELVEEVKRVVEKHHEDNKRIVEALAEMVKDHKRTIDELRRRLEESVKDAEKKLRDVSR

SEQ ID NO: 23225 - protein, 59 aa, Artificial Sequence
  Synthetic
SELEELERRLKELSDESRRVLRELLERLKELSKDLERILEDLKEKVKKIEKDLRELKKR

SEQ ID NO: 23226 - protein, 59 aa, Artificial Sequence
  Synthetic
SDLVREVARVVKEHHDENEDIVRRVKEAVDEHRETIERLRRAVERVVKEVERRLKEEAR

SEQ ID NO: 23227 - protein, 60 aa, Artificial Sequence
  Synthetic
SKDEELERVVKEVREVLDDVNREVTKVSDDVKKRLDELLEEVRRVSDEVRKRLDEVLRER

SEQ ID NO: 23228 - protein, 56 aa, Artificial Sequence
  Synthetic
VEEAKRRLEKLVRDIRRLTEEHKKRHEDLVREVEEIVKKLKDDHRRLVEDIERAIR

SEQ ID NO: 23229 - protein, 59 aa, Artificial Sequence
  Synthetic
SVLDELREKAKKNIKESEELLRRNEDHSRRDTERSKKLLEDLERRVKEVVREAERIKKK

SEQ ID NO: 23230 - protein, 59 aa, Artificial Sequence
  Synthetic
KDVVRDLERVVKEVEDSNRKVADDSRRSTEDNKRKNEKVERDARELLKEIEEIVRRLEK

SEQ ID NO: 23231 - protein, 59 aa, Artificial Sequence
  Synthetic
DSLERLREIVERIVREARRLLRENEEHSERDTREVERLLEEVERRLRRVVEEAEKIKKR

SEQ ID NO: 23232 - protein, 59 aa, Artificial Sequence
  Synthetic
EDVVREARRIVDELRKEVKEIVERSRKSTEDNERRNRKVIEDLKRLVKELEDRIREIKK

SEQ ID NO: 23233 - protein, 60 aa, Artificial Sequence
  Synthetic
DFEERLKEVLKDAERVVDENKKENKKVLDKAKKVVDENRDRNRRVLEEVEREIRRLIDEI

SEQ ID NO: 23234 - protein, 58 aa, Artificial Sequence
  Synthetic
KEVEEVLKEIKDILRESSKTSKDLVRRTEEILEESSRDSDRVAKESKKLLEEVKEEVR

SEQ ID NO: 23235 - protein, 60 aa, Artificial Sequence
  Synthetic
SFEEKLDKVVREVEDKIRRLVKRNRDAVKRVADEIRKLKDRNEEVVDRAREKIKRLIDEI

SEQ ID NO: 23236 - protein, 58 aa, Artificial Sequence
  Synthetic
KEVEEVLTRLKEKLKRVEESSEKVVRDSERLLEKIKKLSKDVEDESRKLLERVEREVR

SEQ ID NO: 23237 - protein, 60 aa, Artificial Sequence
  Synthetic
SEVERLLKELKELLEELKKKVDDVLKDLEELLKRLEDHTREVVKRSEDLLRELEEMKRRG

SEQ ID NO: 23238 - protein, 59 aa, Artificial Sequence
  Synthetic
EEVVRELRRVLEEVRRTAERLLEKLDTVLKKVEDKIRELLKESTRVNKDAKREIDRLRK

SEQ ID NO: 23239 - protein, 60 aa, Artificial Sequence
  Synthetic
SEVETILEDLRRLLEELKKHSDEVVKEIKDLLREIEKHTREVVKTSKKLLKELEELRKRG

SEQ ID NO: 23240 - protein, 59 aa, Artificial Sequence
  Synthetic
EELVRKIEKVLKEVRETIKKIAEDSDRVLEEAKEVAKRLKDESDRVNEEVRKRIEELKK

SEQ ID NO: 23241 - protein, 60 aa, Artificial Sequence
  Synthetic
SDVDRVLEEIRKLLEDLKRHSEKVSEENEDLLRKNTELNKRVSEDNERLLEELKRLRERG

SEQ ID NO: 23242 - protein, 59 aa, Artificial Sequence
  Synthetic
EELKKKLDEVLERAKRTIDRLLETSDRSLEKVERDLRRLNEELDRSLERAERTIRELAK

SEQ ID NO: 23243 - protein, 60 aa, Artificial Sequence
  Synthetic
SEVDEVLERIKRLLERLAEHSDKVVRDIEKLLDDNRKENERLLDKLRRELKRLEEMRRRG

SEQ ID NO: 23244 - protein, 59 aa, Artificial Sequence
  Synthetic
EELRRKLEKVLREAEKVIDELLKKTDEVLKRARETIEDLNRKLDKVLKEVRDKLDRLRD

SEQ ID NO: 23245 - protein, 60 aa, Artificial Sequence
  Synthetic
SSIEKVKREVDEVIKTSKKSSEDSEKLVRDVEERLRKLVKDVRDRVKRVIEEMERLVRER

SEQ ID NO: 23246 - protein, 58 aa, Artificial Sequence
  Synthetic
ELVERLKEVLKRLEEVSEESERRNREVVRRLEDTARKLTEELRRVLTELRDVLRRLEK

SEQ ID NO: 23247 - protein, 60 aa, Artificial Sequence
  Synthetic
KDEETLKRLLEKAKEVVDRLKDENEKVTRDNHESVKKAKDANKRSNEKSERVARDAIRRV

SEQ ID NO: 23248 - protein, 56 aa, Artificial Sequence
  Synthetic
VRELAKKVEKAIRELEELSRENREAVKRISDEIKRLSDENAKDSERIIKEIDDRVR

SEQ ID NO: 23249 - protein, 60 aa, Artificial Sequence
  Synthetic
SDDETVTKLLKEAEKVVRELTKRNKELLRKNHESVREAKKRNEDLSRKLEEVVRRLIEEI

SEQ ID NO: 23250 - protein, 56 aa, Artificial Sequence
  Synthetic
VKDLAKKIEDVIREMEELTRRNEKRIEEISDEIRRLSDTNRREIERIREELRRRAK

SEQ ID NO: 23251 - protein, 60 aa, Artificial Sequence
  Synthetic
REDERLEEIARKIKKVVDELVERNKKLTEDNHESVRRAEKRNRELSRELEEVAKRAIERI

SEQ ID NO: 23252 - protein, 56 aa, Artificial Sequence
  Synthetic
VEDIERKVEDIIRRLEDLSRRNEEKVRRISEEIKKLSKDNERTIKEIIKEIEERVK

SEQ ID NO: 23253 - protein, 60 aa, Artificial Sequence
  Synthetic
DELDRLREEIKALIKESRESLKRLEEESRRLAEELRKLIRELKERIERIIEEARRLAKEI

SEQ ID NO: 23254 - protein, 59 aa, Artificial Sequence
  Synthetic
DDVRKKVEDVLEEARRRITDDEDKTKKVHDESRRVVEEVRERVKRLLDKARTVVKEIEK

SEQ ID NO: 23255 - protein, 60 aa, Artificial Sequence
  Synthetic
SEVEDLERKIEELIERAKRLVEELEERSRRLIRELEELSKKNEEDIERLIKEAKKLAEDI

SEQ ID NO: 23256 - protein, 59 aa, Artificial Sequence
  Synthetic
EEMRRRVRELLKKAEEVVRRLEKDSDRVSKESEDMVRELLRRNEEALRKAEEVVREIKR

SEQ ID NO: 23257 - protein, 60 aa, Artificial Sequence
  Synthetic
KDIDELRKRIETLIREAKKLVDDVRKRSEDLIERLKKLSEDNARDIERLLREAEDLARKI

SEQ ID NO: 23258 - protein, 59 aa, Artificial Sequence
  Synthetic
REVKERVRRLLEKAADVVRRLIEESNRVSDDSRRVVKELLDRNKELLDRARKRVEEIRK

SEQ ID NO: 23259 - protein, 60 aa, Artificial Sequence
  Synthetic
DDIERLKREIERLLKEAEKISRDNEERSKELLDRLRKLSEDNKRKIDKLVEELKRLADKI

SEQ ID NO: 23260 - protein, 59 aa, Artificial Sequence
  Synthetic
EKVKRDAREALRKAKKKVDELKRKNDEVHRRSREEVKRLLEENRKLLEDLRRMVREITQ

SEQ ID NO: 23261 - protein, 57 aa, Artificial Sequence
  Synthetic
RKVEEVEKHSRESIKEIERLVEEVRKHSKDSIRRIEKLVEDVERHSRKVIEELERDK

SEQ ID NO: 23262 - protein, 59 aa, Artificial Sequence
  Synthetic
KDMVRRLEKILKEDKEVVKKAEEELRELLKEDREVVKRAEEELERLLKETEDVVRKVET

SEQ ID NO: 23263 - protein, 57 aa, Artificial Sequence
  Synthetic
SALEEVKRHSEESIKAIEELVRRVEKHSRESSKRNEELIREVEDHSRRVIEELKRKK

SEQ ID NO: 23264 - protein, 59 aa, Artificial Sequence
  Synthetic
EDVVRAAEKLLEEDRDAVRRAKEKLDELLKRDRDSSREAIRELERLLKETRDVLREVER

SEQ ID NO: 23265 - protein, 60 aa, Artificial Sequence
  Synthetic
SEIEKILKDVDKKLKDSSRESEESVKESRDLLRESSERSERSVRETRKRVDDLLRLVDER

SEQ ID NO: 23266 - protein, 59 aa, Artificial Sequence
  Synthetic
EDMKREIDKLVEKLKKVLRDNKRLHEKVIRELEEVVTRNEELHRRVIKEAKEVVDRVRK

SEQ ID NO: 23267 - protein, 60 aa, Artificial Sequence
  Synthetic
SEVEEVLRRIEELLREDKRHVEEVVREIRELLKRNKDMVDEVLKRIEDLLREIDEARKRG

SEQ ID NO: 23268 - protein, 59 aa, Artificial Sequence
  Synthetic
EEVIRKLDDILRKVKRVSEDNKRETDKVREEVAEVVKRSKDKLDKVRKDVKRVIERVRT

SEQ ID NO: 23269 - protein, 60 aa, Artificial Sequence
  Synthetic
DEVEKAAEDVERRLREDEDHARKVVKRIRELLEEDTRTVDKVLREIEKLLKDITDLRRRG

SEQ ID NO: 23270 - protein, 59 aa, Artificial Sequence
  Synthetic
KELTEKLDRLLERVEEVSKRNEDATRTVEKEVEEVVRRTKKKLDDILERVERVARELKR

SEQ ID NO: 23271 - protein, 60 aa, Artificial Sequence
  Synthetic
ELIKKARKDVEEVRERSERLVDELRKRNKKLADESRRLIDKLRKDVEKVLREIEDLLRKR

SEQ ID NO: 23272 - protein, 59 aa, Artificial Sequence
  Synthetic
KKLMEEVERLIKRLEDVNEKSERDVREINKESERVNEETEREVEDAIRKLREVLRRAKK

SEQ ID NO: 23273 - protein, 60 aa, Artificial Sequence
  Synthetic
KEVEDLERRVKEILDRMKRLIDENRKKIEKSIRELERLIDENRKEVERVKKELKDLKREG

SEQ ID NO: 23274 - protein, 59 aa, Artificial Sequence
  Synthetic
KEMEKKLEDIVRRVREVVRRAHETNERLVDRSRKAVEKAERTNRRLVEEIRKVAEEVRK

SEQ ID NO: 23275 - protein, 60 aa, Artificial Sequence
  Synthetic
DEIRELEERVRRILDELRRLVERNREVIERSIRELEKLLDRNRRKVEEILRRIDDLTRRG

SEQ ID NO: 23276 - protein, 59 aa, Artificial Sequence
  Synthetic
ERVKEAIKELVKDVDRVMREVDRANRELTKTSKKVLEDVDRTNRRLVKEVRDVVERARK

SEQ ID NO: 23277 - protein, 60 aa, Artificial Sequence
  Synthetic
KEVEDLERTVRTILKRMRELITRNEEEIRRSIEELKKLLKENKDTVRRILEEMKELKKEG

SEQ ID NO: 23278 - protein, 59 aa, Artificial Sequence
  Synthetic
EDAKRKLDELTKRVEKVVREADERNKRLTKRSKEVLDEVHRANEEALKEVEEVVRRVTK

SEQ ID NO: 23279 - protein, 60 aa, Artificial Sequence
  Synthetic
DEIEELRKKAEEIIRRMEDLVRRNTETIKRSIETLKKLIDENRRRVRKIIETMKELKRRG

SEQ ID NO: 23280 - protein, 59 aa, Artificial Sequence
  Synthetic
EEVKEAIERLVRRVEEVVRKVREENKRLNEESEEVVRRADRTNREILKRVRDAVREVRR

SEQ ID NO: 23281 - protein, 59 aa, Artificial Sequence
  Synthetic
DAEDTLRDITRKVRKVLEEHRETIERTIRKNRESLERVKRAIEELIERSRRALEEVTRS

SEQ ID NO: 23282 - protein, 59 aa, Artificial Sequence
  Synthetic
DEMLKRVEDIVKKLIEDLREMAKRNRDISKEVDDRLKKILDEVRKHSEEVIKRLKDEER

SEQ ID NO: 23283 - protein, 59 aa, Artificial Sequence
  Synthetic
SAEETLERLAREVRKVLEEHARKIKKTIDDSRRVLEEHRKTIKRTIDESRKVIKDVRDD

SEQ ID NO: 23284 - protein, 59 aa, Artificial Sequence
  Synthetic
EEVLRRVTEEVKELIERIERLLKENRKHSKKIIDRLRELLEENRRHSEELRKRLEDERR

SEQ ID NO: 23285 - protein, 56 aa, Artificial Sequence
  Synthetic
SSLDEIRRKVREAIERLERLLEENRRKVEEVKRRNERLLDRNREVVDEVIKRLEEM

SEQ ID NO: 23286 - protein, 59 aa, Artificial Sequence
  Synthetic
REVDEELKRLVEEVKKVVDDVRRENKRLLEEVERVSEEVKKTNEKLLERVKRVVEEAER

SEQ ID NO: 23287 - protein, 55 aa, Artificial Sequence
  Synthetic
SSLDTAREHTRDVIKKIDDILRRNEKLVDDVIRELERLLRENAEVVERVIDRLRR

SEQ ID NO: 23288 - protein, 59 aa, Artificial Sequence
  Synthetic
REVVEELKELRKRSEEVVDRAEKALRRSVRKAEKVVEEVERANKRLLERVKKVVDDMRR

SEQ ID NO: 23289 - protein, 61 aa, Artificial Sequence
  Synthetic
EVRERVKEVIERSEKSVRELERIVEELARRLRESVEDLERKIRELSKELRRVVEELVRTRG

SEQ ID NO: 23290 - protein, 59 aa, Artificial Sequence
  Synthetic
EEVVRRIEELLKEVHKENKRVADELKKLVEDLHDRNRRVKEEVKRRVDEVRRKAEEVAR

SEQ ID NO: 23291 - protein, 61 aa, Artificial Sequence
  Synthetic
EVDERIRRLVEESRKSVEDLARIVDELVERLRRSVRDLEEKSKRNKEELEKVLRDLARTRG

SEQ ID NO: 23292 - protein, 59 aa, Artificial Sequence
  Synthetic
EEVVERVERLIEKVHRDNRRVAEKLREDVRRVHEDNKDVARKSHKLVKEVRDTVREVRR

SEQ ID NO: 23293 - protein, 56 aa, Artificial Sequence
  Synthetic
DVLKEVEEDSRRNHERNRRVAEKVTDDSRRNVKRLEEVAEEIKDDSRKNKERLDKL

SEQ ID NO: 23294 - protein, 59 aa, Artificial Sequence
  Synthetic
KEIEKILRDVLKENEDSLRELKEILERLLEENRKAVEKLKRILEELLRRNDEMLKRVRT

SEQ ID NO: 23295 - protein, 56 aa, Artificial Sequence
  Synthetic
SVDEEVRRDSKKNKEDLDRVAEKVKRDSEENMRRLEEVARKVTEDVKRNKKTLEDL

SEQ ID NO: 23296 - protein, 59 aa, Artificial Sequence
  Synthetic
EEIRRILKELLERNERALEELKKRLRKVLEENKTVLEELRRRLEELLRRNKRMVDEARR

SEQ ID NO: 23297 - protein, 59 aa, Artificial Sequence
  Synthetic
DEVEKLVEDVARVNKKSLDEVRRLLEELEKVSRDHRREVERSLREAEKVLEDLKREAEK

SEQ ID NO: 23298 - protein, 55 aa, Artificial Sequence
  Synthetic
DEIRKVKKHNEDVLRKVRKILKDAERISKRALDENERILKEVEKRVRDVIRELER

SEQ ID NO: 23299 - protein, 59 aa, Artificial Sequence
  Synthetic
DEVDDVVRRLEEENRKSEERAKDTLRKAKKVLDELKKRVKESEDRVKEVLDDVEERVRR

SEQ ID NO: 23300 - protein, 55 aa, Artificial Sequence
  Synthetic
KRVRDALRHNEDVLRRNDEIVDELRKRVEDVLKKNEDDVRRVAEEVRRVIEELRK

SEQ ID NO: 23301 - protein, 59 aa, Artificial Sequence
  Synthetic
DRVEEVVKRAKDENRKSEEEVKKSLKDLEDLSREHEKRIRDLLKEVKEILDRIREEVEK

SEQ ID NO: 23302 - protein, 55 aa, Artificial Sequence
  Synthetic
DEIRKLERHNEEVLKKNETIARDLEKRSREVVKRLEDILRKVEREVEKALEEVRT

SEQ ID NO: 23303 - protein, 56 aa, Artificial Sequence
  Synthetic
SVEEELRKLKEEIDRVLEENKKIIDDIRKELDDVNRENKKIIDDIRKEIDDVLERV

SEQ ID NO: 23304 - protein, 59 aa, Artificial Sequence
  Synthetic
EKDLKKLLEEVRELLERSRRASEELLREVKRLLDESRKESKRLADDVRRLLEELERRTK

SEQ ID NO: 23305 - protein, 56 aa, Artificial Sequence
  Synthetic
SVEDIIRKIEKELDDVNRENEEIIRRIKKELDDVNRRNEKIARDSKKRVDDVLRKV

SEQ ID NO: 23306 - protein, 59 aa, Artificial Sequence
  Synthetic
EEVVKKIREEVRKLLEESKRRSDELAKEVRELLKRSEDKSRRNLEEVEKLLKEVEDRTR

SEQ ID NO: 23307 - protein, 60 aa, Artificial Sequence
  Synthetic
KDLEDVLDKVRKDLERSKKHSDDVVKTIRELLKESEKHSEELVKRVEKLLEELRRMTTRG

SEQ ID NO: 23308 - protein, 56 aa, Artificial Sequence
  Synthetic
ESILRELERRVKKVVEENDEITRRVEREVEKVDKKNKDITDTLRTRVKKAVDEARK

SEQ ID NO: 23309 - protein, 60 aa, Artificial Sequence
  Synthetic
SDIERLLREVEKVIRDSEEETRKLLEEVEKALKDSRDSSEDVKRKVDDILRKLRELRRRN

SEQ ID NO: 23310 - protein, 60 aa, Artificial Sequence
  Synthetic
MERIERLLREVRKRVEEAAKRNKDVIKEIEERVRTVHDENRRLLEEIAKRVRDVLEEVRT

SEQ ID NO: 23311 - protein, 57 aa, Artificial Sequence
  Synthetic
KVEEELEKEVRRALEESKRLLDRLTEHSKRVLDELRELLERVERDVRRVLEELKRER

SEQ ID NO: 23312 - protein, 56 aa, Artificial Sequence
  Synthetic
KDVVDRLEKELKKVNDEARKRIEELLRESDRVLEEVKKKMRELERELKKVLKEVRD

SEQ ID NO: 23313 - protein, 57 aa, Artificial Sequence
  Synthetic
DEVEDADRKVRTVLEDLRRRLEELKKHSDDVSRRNEKLLRELKEHSDRLVEEIKRDK

SEQ ID NO: 23314 - protein, 56 aa, Artificial Sequence
  Synthetic
KRVVDELLKKLRDVLEEVRRTVDELVKRSEESLRRAREVIRRLLEKTREVLEEVRT

SEQ ID NO: 23315 - protein, 55 aa, Artificial Sequence
  Synthetic
STEDVLRKIKEDVKRVIDDNRRILDEVRRTSKRVLDDLRRNLKHIAEEVERVLRE

SEQ ID NO: 23316 - protein, 56 aa, Artificial Sequence
  Synthetic
SKELLEKAKRVVDEIKRLAEESLKRLEDLSRDHKRRAKELNDEIRKVVDELRKRAT

SEQ ID NO: 23317 - protein, 55 aa, Artificial Sequence
  Synthetic
SLEEVLDEIRKLVERALRDLERNLRHVTRTSEEVLRRNEEILRRIEEKVDRVVRN

SEQ ID NO: 23318 - protein, 56 aa, Artificial Sequence
  Synthetic
SKELLDEIRRVLEEVKRRVEELNKELKDLSDKHKEKAKRTDETITDVLRKAEERER

SEQ ID NO: 23319 - protein, 60 aa, Artificial Sequence
  Synthetic
SVEELLREVAELVKRVDEDLRRLLEEVRRSNEEVIRRLEEILKRIEEENRKVVEELRRRG

SEQ ID NO: 23320 - protein, 59 aa, Artificial Sequence
  Synthetic
EETVKRLLDELRELLERLKRTIEELLKRNRDLLRDAEEKARRLLEENRKLLKKARDTAT

SEQ ID NO: 23321 - protein, 60 aa, Artificial Sequence
  Synthetic
SLEELVRDVERLVKESIEELERVVEDVRRLNTELKEKLERVAREIKKRNDDLVRELRTAG

SEQ ID NO: 23322 - protein, 59 aa, Artificial Sequence
  Synthetic
EEVIDRLRKELEDIIRESRKNLEDLLRENKRLVEEVERTLRELLRTNKELLERIREEVR

SEQ ID NO: 23323 - protein, 60 aa, Artificial Sequence
  Synthetic
SVEEMLEKIRRRATESVKRLRKILKEIKERNEKAIRDDRRLLEEIERRIREVVKRLRDAG

SEQ ID NO: 23324 - protein, 59 aa, Artificial Sequence
  Synthetic
EETVKRLEEEVEKIVRDSERNAREMLERNRRLIEESKKRTKDLLKEVEDEVRKLEEEVR

SEQ ID NO: 23325 - protein, 60 aa, Artificial Sequence
  Synthetic
SVEEIVRRIREELKKVEEDSERIVRTVEDVLRKVLETVERIVRESEKRSRDAVRRIREKL

SEQ ID NO: 23326 - protein, 59 aa, Artificial Sequence
  Synthetic
DEVATRLLKEVKEELDRLREENERLLRELKETVEKLKRDAEKVVEDDERLVRELEKRVD

SEQ ID NO: 23327 - protein, 60 aa, Artificial Sequence
  Synthetic
DIEELLEEIRRRAEEAHRRNEDLLRKIKELVKKARKDNEKVVRDIERRLREVLERVRKKI

SEQ ID NO: 23328 - protein, 59 aa, Artificial Sequence
  Synthetic
REEVKEVLKRVEDLLRTSEEETKELLKRVEDELRRSKEDSEDVLRKVEELLERIDRRVT

SEQ ID NO: 23329 - protein, 60 aa, Artificial Sequence
  Synthetic
KEIEEILEEVKRLLDKLKEDSDRILERVRELLERSKEKSREILKRVEDLLRELEKLVRDD

SEQ ID NO: 23330 - protein, 59 aa, Artificial Sequence
  Synthetic
EELRRVLEEIRRLLEEVRRKIEEASRRLKEDADRVHRKNEEILKRIEELIEEVKRRVEK

SEQ ID NO: 23331 - protein, 60 aa, Artificial Sequence
  Synthetic
KEVEDILREVDKLLKESKRKSEEALKRVKRLLDELKKTSKRILREVEKLLERLRRLKKDD

SEQ ID NO: 23332 - protein, 59 aa, Artificial Sequence
  Synthetic
KDLKKIVDDIRRKIDKVDKDNERLIKELEDRVRKAREDIRDISRRIRELVKRVVDEVEK

SEQ ID NO: 23333 - protein, 60 aa, Artificial Sequence
  Synthetic
DEVETILRDVKRLLEESRRESERVLEEVRRLIEELKKRSRDIMEEVKKLLEELREIVRRD

SEQ ID NO: 23334 - protein, 59 aa, Artificial Sequence
  Synthetic
EEARRLLEEADRLVREVDKENEDILRRIEESVREVEERIRRISRAIEESIRRVKEEVER

SEQ ID NO: 23335 - protein, 60 aa, Artificial Sequence
  Synthetic
KEVEDLLREIERLLKESRERTKKVEEDVKRLLDESRKTSEDVLREVERLIRELEKIVRED

SEQ ID NO: 23336 - protein, 59 aa, Artificial Sequence
  Synthetic
DKARKLVEEAKRRLDTVNEENKDVVRKIKEDLERVDEENRDVLRRIKRIVERVEEEVRR

SEQ ID NO: 23337 - protein, 58 aa, Artificial Sequence
  Synthetic
DEAERLLRRIEEILKRSKDVSDKLLEDNEKLVRDVKRRLDEHLRKNREALKKLREELK

SEQ ID NO: 23338 - protein, 56 aa, Artificial Sequence
  Synthetic
DEVVRRIEELVKKLEEDNKRVVEEIKKLNDDLRREVKRVLDEARKLNKEIVDELRK

SEQ ID NO: 23339 - protein, 59 aa, Artificial Sequence
  Synthetic
SEVDELRRRVEEVERRSEENSRKHLEDNEKMVDDLRKNLERHLKENKELVERVRRVVED

SEQ ID NO: 23340 - protein, 56 aa, Artificial Sequence
  Synthetic
DRVVEDLKRRADELVRRNERAAEEVRRLNEEVVEDLKRVVKEVKDLNDELVKEVRR

SEQ ID NO: 23341 - protein, 60 aa, Artificial Sequence
  Synthetic
SVEEVLKEIEKEHRRSEEEVKDVLRKARKINEEVERRVKEVVDRIRETIARVRKEVKDRN

SEQ ID NO: 23342 - protein, 59 aa, Artificial Sequence
  Synthetic
KDVLKKLLDRSRRLVEKVRDDLRKAEEKNRRVAEEIKETLKRMEDRVREELKEIKKKAK

SEQ ID NO: 23343 - protein, 60 aa, Artificial Sequence
  Synthetic
SVEEVLKEIEDLHKKSIDEVREVLKEAEDLNRRAVKEVEDALRESEELNRRVTKEVRDEN

SEQ ID NO: 23344 - protein, 59 aa, Artificial Sequence
  Synthetic
KEVLDRLLEKSEKLARDVRKRLKEVLDKNRKVVEEIRKVLEELLRHSERKLERIRERLK

SEQ ID NO: 23345 - protein, 61 aa, Artificial Sequence
  Synthetic
DVEDVVRELKKLLDEITRRSEEVVKRLHDRNEEAKEEVRRVVKEVRERLKKVVDDVRRELK

SEQ ID NO: 23346 - protein, 59 aa, Artificial Sequence
  Synthetic
REVLRKLKKEIKDLLDRIEELNKKVLDESEKLIKEIREDLRRVKEEIKEELKRIREEVR

SEQ ID NO: 23347 - protein, 61 aa, Artificial Sequence
  Synthetic
SVEEVVRRIKEKLETVVDESRRVVKDLHDKNKEIVEESRKVLRESEKVDEDVVEEVRRRLG

SEQ ID NO: 23348 - protein, 59 aa, Artificial Sequence
  Synthetic
DEELEKLLREIEDLLRKIRKLNKEVLDRSRKLLEDIRRLNKRALERNRKIAKEIRDEVK

SEQ ID NO: 23349 - protein, 56 aa, Artificial Sequence
  Synthetic
DSAEKLERDVRRALERIRKRLEENDRRVEEILERIRRRLREDLETSREVLERLRKE

SEQ ID NO: 23350 - protein, 56 aa, Artificial Sequence
  Synthetic
ESVIEKLERLLDELLEEVKRVVETSEKKLDELLEEVKRVVEESKKALDDLLREVEK

SEQ ID NO: 23351 - protein, 61 aa, Artificial Sequence
  Synthetic
DKVDEVLRRVRELLERLRKLLEDNKKTTDELLEELRRILKEDEDRTRKLLKRLRDVKREEI

SEQ ID NO: 23352 - protein, 56 aa, Artificial Sequence
  Synthetic
DRMMKRLKEELERIRKKVREVLERSSRAVERIEREVDEVVKRSSDTVKRILDEVRK

SEQ ID NO: 23353 - protein, 61 aa, Artificial Sequence
  Synthetic
SEAERVRRRVEELLRELREHSRRVLEEVKRLLEKLREDNERSLRRIKKLLDELRRVRERDL

SEQ ID NO: 23354 - protein, 56 aa, Artificial Sequence
  Synthetic
EEVLRDIERRVREIEKEVREVTRAIEESVKKIEKESRDVLRAIAETIRKIEEEVKK

SEQ ID NO: 23355 - protein, 61 aa, Artificial Sequence
  Synthetic
DEAEEVLKTVKKLLDDLRRRNEDSLRRIEELLKRLRDHSKRVLEEVRRLLEELRRVKERDL

SEQ ID NO: 23356 - protein, 56 aa, Artificial Sequence
  Synthetic
EEVLRKIKKDVEKIVRDSERVIKTIEEKIDRIKKEVKRVTDEIRKRVEEIAEEVRR

SEQ ID NO: 23357 - protein, 60 aa, Artificial Sequence
  Synthetic
SELEDVLRRSRDLLRRLKELLERLLETVRKLIEEAKELLKKILEDSRKLIREVEEMVRRG

SEQ ID NO: 23358 - protein, 58 aa, Artificial Sequence
  Synthetic
EEIRRVIKESKDLSRALEETVRRVERKIEDLLRRIKEEAERVIKESEKLIEDAERATK

SEQ ID NO: 23359 - protein, 59 aa, Artificial Sequence
  Synthetic
DEDEEVERELKKIKDKSKKVLDKSRKTIDELRKEVERTLRRWTKRSKDLLDKVEAAKRR

SEQ ID NO: 23360 - protein, 55 aa, Artificial Sequence
  Synthetic
EEVLRKVDTILKEIKRRNEKVLKELRDIIDDLAKKLDEVLRRDEELAKKVTEELK

SEQ ID NO: 23361 - protein, 59 aa, Artificial Sequence
  Synthetic
SEDEDARRTLREMLEESRKHLKEWEDTSRELEKKSREVLKETRKTIAKLADRVRKAKEN

SEQ ID NO: 23362 - protein, 55 aa, Artificial Sequence
  Synthetic
EEVLEDIRRKVEKLEEDNRRVMKKDEDAVRRVEEENRKVLKELKERIDRLAEELK

SEQ ID NO: 23363 - protein, 60 aa, Artificial Sequence
  Synthetic
DEDREAEETIKRLLDRSRKTLEESRKTSEDLRRKSEKVLRETRKSLEDSLRKVREMKKRN

SEQ ID NO: 23364 - protein, 55 aa, Artificial Sequence
  Synthetic
EKVLRDLEEIVRRAAKANKDVLDEDRRVMEEAREENKRVIDEYRKILKEATDELR

SEQ ID NO: 23365 - protein, 60 aa, Artificial Sequence
  Synthetic
SEDEEAKKTLDELLKKAEELVKKIKETSERLLRKSDKLLEETKKTIKELDDEVKEVKKRN

SEQ ID NO: 23366 - protein, 55 aa, Artificial Sequence
  Synthetic
EEVLRRIEEIIRRVTELLKKVLKEDREVVEEARKKNEEVLDRLKKIIEEAEERLR

SEQ ID NO: 23367 - protein, 59 aa, Artificial Sequence
  Synthetic
DEDEKAKRMLEEAEKKSKKHVDEVRETSKRLLEESKKLLEETDRSLRKSLERVDRVKKN

SEQ ID NO: 23368 - protein, 55 aa, Artificial Sequence
  Synthetic
KRVLDDIKTKVERLEERNKKVLDDDREMVTRAEEENRRVIKKYRDILEEARKRLK

SEQ ID NO: 23369 - protein, 59 aa, Artificial Sequence
  Synthetic
SEDEDLDRVAEKLKREHKKSVEEIKRVLKRADEESKKLVRDTERVIEEIKREVEEARRR

SEQ ID NO: 23370 - protein, 55 aa, Artificial Sequence
  Synthetic
EEVLKKLREIVRRVKEENRKVNEEVEKRLRELEEENKKVIEDLKKTVEELVERLR

SEQ ID NO: 23371 - protein, 59 aa, Artificial Sequence
  Synthetic
DDLEDIKRRLDEMREEVKRHVKRLKEVAKEIEDEHKETVRRNKEVAKKLAREIDDARRR

SEQ ID NO: 23372 - protein, 59 aa, Artificial Sequence
  Synthetic
KDKVDKVLREVTEEVKRLEEEIKKVDKEIEEIVRRVERENEEVVRDIARIVEELERKLR

SEQ ID NO: 23373 - protein, 60 aa, Artificial Sequence
  Synthetic
RELEEVIKRIEKTVTDNERANKESVDRIREIVDRLKKEIEESVRRMRDSVKKLEEEIRRR

SEQ ID NO: 23374 - protein, 59 aa, Artificial Sequence
  Synthetic
EELIRRLEKVLKEHHKRVEEIVKENEDVARDLDRRIKEIVERNRKVLEDLRRRIKELKK

SEQ ID NO: 23375 - protein, 60 aa, Artificial Sequence
  Synthetic
SEIEDALRRAERVSRESAKKLEDALRKYEKVSRDLKRRLDEVLKRYEDTSRKIAKDLRDN

SEQ ID NO: 23376 - protein, 56 aa, Artificial Sequence
  Synthetic
EETIERLIEKNKREVDKLLKKIEEVIKRNKDEVDKLLKKIEEVIDRNRRAMEEIAR

SEQ ID NO: 23377 - protein, 60 aa, Artificial Sequence
  Synthetic
SIEDELRKIVEDIEREIKKLEDDLRRVSKDHRDEVRRILEKLKEHIERLEEDADRLKKAK

SEQ ID NO: 23378 - protein, 58 aa, Artificial Sequence
  Synthetic
ETVREMIKRLEELVRRVKRRIEDVIRRNREVVDESRRRIEKAIEDNERVLKKIEEEVK

SEQ ID NO: 23379 - protein, 59 aa, Artificial Sequence
  Synthetic
SIEEEIKKVVKELEDEARKLLKKIEEHSEDLKRKLEDLLRKVEDHIRRLREEIERIKRE

SEQ ID NO: 23380 - protein, 58 aa, Artificial Sequence
  Synthetic
ETVKKAIKELRDLVDKIEEDLKRVLDENERVLREIARKIDEIIEKNERELRRVLEEIR

SEQ ID NO: 23381 - protein, 57 aa, Artificial Sequence
  Synthetic
DEAEELERRLREEVKRVETDLRRTTRELEREVEEVRRRLEKTSRENNDRSEKAERED

SEQ ID NO: 23382 - protein, 56 aa, Artificial Sequence
  Synthetic
KEVVDRLREIITDLVRKLEENVKRLEEIIKRLEEELKRNVDRLRENSKRLAERLRT

SEQ ID NO: 23383 - protein, 57 aa, Artificial Sequence
  Synthetic
SEAEKVLEEVRRLIEEIRRRLKETTDDVRRLVRELKEEAKRLLEEDKRLVDDLRRRN

SEQ ID NO: 23384 - protein, 56 aa, Artificial Sequence
  Synthetic
KEVVDKIRKVAEELKKELKDNADRVRRIAERLKEELKRVAEKSDRIIRTLEEELKR

SEQ ID NO: 23385 - protein, 57 aa, Artificial Sequence
  Synthetic
SEVERLVREVEKDLERERRRLEKTVRDSERLVRELKETLDRLLKRDKDVVDDARRKN

SEQ ID NO: 23386 - protein, 56 aa, Artificial Sequence
  Synthetic
KSVVDRLREIVKELKDRNRKVVKELEDIHRDSDRELDDVVRRSDEIIRELVERLKT

SEQ ID NO: 23387 - protein, 59 aa, Artificial Sequence
  Synthetic
DLEEIIKTIREINERLNRRVREVEERLRRTSRELEERIRDVVRKLREINDRLRKEVEAR

SEQ ID NO: 23388 - protein, 55 aa, Artificial Sequence
  Synthetic
ERLVRENEEAVKRLTKELDDLLRKNEELIRRLEEEAKRVLERNEKIARDVREELK

SEQ ID NO: 23389 - protein, 59 aa, Artificial Sequence
  Synthetic
DLEEIIRKIREINRELNETVKKVVRELEEDTRRVKRRIEEIVKELERTTRELDKRVKDS

SEQ ID NO: 23390 - protein, 55 aa, Artificial Sequence
  Synthetic
EKLVEDNRKEVRDLEEEARKLLRENHELTKRLIEEAERILKKNEELIRKIEEEER

SEQ ID NO: 23391 - protein, 59 aa, Artificial Sequence
  Synthetic
SLEELLEELERILREVEERIKEVVRRLEEDTRRVEEEIRRIVEELKRINRELEELVRRT

SEQ ID NO: 23392 - protein, 55 aa, Artificial Sequence
  Synthetic
ERLVKEVRDTVKELEDELKELLDRNHELTRRLEEEAKRLLEENKKRADDVKEELR

SEQ ID NO: 23393 - protein, 59 aa, Artificial Sequence
  Synthetic
RLDEVIRRVEEVIRDVERRVAEVVKRLRDSSKTVKEKIETVIRRNKEINKRLEDLIRES

SEQ ID NO: 23394 - protein, 59 aa, Artificial Sequence
  Synthetic
EDDLRRTLEEVKRTIDKLKEDAERLLEENKDLIRRLEEELKESSKRNDTLVKKLKKELK

SEQ ID NO: 23395 - protein, 60 aa, Artificial Sequence
  Synthetic
REMEEALKRNNELSERLRRELKRVLEENHRLSRDLEKKLRDLLERVRELVERLDRMKEEG

SEQ ID NO: 23396 - protein, 59 aa, Artificial Sequence
  Synthetic
EEVRRVLEEIRRDTEELEKDARRVLTELRRNLERLRRKVEKVLEEIRRILEELERRVRK

SEQ ID NO: 23397 - protein, 60 aa, Artificial Sequence
  Synthetic
DKLEKLEEKLEKDVRRWDDELRRDLEDSKRLVDTIRKRLEKLLRDHRELVRRIRELLRDG

SEQ ID NO: 23398 - protein, 55 aa, Artificial Sequence
  Synthetic
EVVRRLEEEVRRLEEKVKEVLRRNEEEVRRLEKDIERVLRESTKIVEDLKDEVRK

SEQ ID NO: 23399 - protein, 60 aa, Artificial Sequence
  Synthetic
SVEEVVEELERIHREVKREIDEVVDRLREINEEVRREIKEVLDKIREDLERLKEEIDRDL

SEQ ID NO: 23400 - protein, 59 aa, Artificial Sequence
  Synthetic
DDILREMLRKSEELVRESREDLKRLLEEHRKLVEESRRELERLKKEVKDAVEEVRRRLK

SEQ ID NO: 23401 - protein, 60 aa, Artificial Sequence
  Synthetic
SVEEVVEELKKIHEDVKRKIDEVLKRLKRINDELRKRIREVLERLRREAEKLMEAIRRDA

SEQ ID NO: 23402 - protein, 59 aa, Artificial Sequence
  Synthetic
DDILREMLKESKELVKRSEKTLRELEKRHRDLVREVEETLKELEREVERKVREVERRVR

SEQ ID NO: 23403 - protein, 60 aa, Artificial Sequence
  Synthetic
SVKEVLDEIRKINDDARRRLEEVLKDLKRINDELKERVDRVHDRNRRLLEELKKEIRTKL

SEQ ID NO: 23404 - protein, 59 aa, Artificial Sequence
  Synthetic
DDILREMLERNKELVKESKKVLEELEREHRELVREVKKRLDDSTEKIKTEVDKVKKELD

SEQ ID NO: 23405 - protein, 60 aa, Artificial Sequence
  Synthetic
SVEEVIKEIEKIIRDLKEELKKVLTELEKRNEELKRRVEEVHEESRRLLDTIRKEIERKL

SEQ ID NO: 23406 - protein, 59 aa, Artificial Sequence
  Synthetic
DEVLEELLRRVKKTVKEVREDLDRLRKEHEELVDRVREELERSLREIKERLERIKRRLD

SEQ ID NO: 23407 - protein, 59 aa, Artificial Sequence
  Synthetic
KEAEELLEKVRKLVKEIEDRLRKSSEENRELVKRVEDELRETTKKNKKLVDEIKERREK

SEQ ID NO: 23408 - protein, 56 aa, Artificial Sequence
  Synthetic
EDVLRRIEEILERVERAVREVLRRNKEINDRLRERVEDVVRKNEDILRRVLDEVRK

SEQ ID NO: 23409 - protein, 59 aa, Artificial Sequence
  Synthetic
DEVERLIEEVDKLVKTIEEELRRSSEKNKDAVRRVKRRLEKSNEDNREVVRRVDKERRD

SEQ ID NO: 23410 - protein, 56 aa, Artificial Sequence
  Synthetic
EDVLRTIKEILRELRERVEEVAKRNKEINDRLNEDVERVVRENKELNDRLRERVDR

SEQ ID NO: 23411 - protein, 60 aa, Artificial Sequence
  Synthetic
DEAEKLIEEVKRLVEDLERKLDESSRRNEETVKRIDKELKDSNKKNRDTVKKVTDTAKDS

SEQ ID NO: 23412 - protein, 56 aa, Artificial Sequence
  Synthetic
EDVLRTIKKILDDLERRVEEVVRRNREILKDLERKVRRVFEENEKLNRELEERVKT

SEQ ID NO: 23413 - protein, 60 aa, Artificial Sequence
  Synthetic
SKADEVEKDVDRKLKEVKKRLDETRESVRRKLEEVRRELEESEKSVETVLREVKKTKDRG

SEQ ID NO: 23414 - protein, 56 aa, Artificial Sequence
  Synthetic
EEVLKKLKDIATELRERLDRNNKELTDIHRELKERLDRNNTKLSEIHKRLEEELDK

SEQ ID NO: 23415 - protein, 60 aa, Artificial Sequence
  Synthetic
SEVDEARKRVRDVLEEVRKALEETEKSVRRTLEEVEKRLKESEDSVRKVLEDVRRELERG

SEQ ID NO: 23416 - protein, 56 aa, Artificial Sequence
  Synthetic
EEALRELEEIARRLERELEKNNKDLTDIHETLRRRLEDNNRKLSKIHEDLARELRK

SEQ ID NO: 23417 - protein, 58 aa, Artificial Sequence
  Synthetic
KEAEDMLREVKRLIDRIKKVLEDVLKAIEELIRRLEDIHRKVNEDSERLTEDLKRTIG

SEQ ID NO: 23418 - protein, 59 aa, Artificial Sequence
  Synthetic
KEKIEELLRRVEELIRRIEEEVRKLLEDVERKIRESVKEAEELLRRSKKEIERVKREDT

SEQ ID NO: 23419 - protein, 58 aa, Artificial Sequence
  Synthetic
SEAERVIRESERLTDELRKELEKALRRSKKLSDELRKIHEDANREVRKLIEDLKRTIG

SEQ ID NO: 23420 - protein, 59 aa, Artificial Sequence
  Synthetic
EEILKKLLDESRDTVRRVEDTVRKLVRRSEEFVRKSKERVKRLLDDVRRKIEDVKRKTK

SEQ ID NO: 23421 - protein, 59 aa, Artificial Sequence
  Synthetic
DEEERLLREAEEMHERNKRLIDKLRREVEESLKEVEREIRRLLTDIARLVRRVEELKKN

SEQ ID NO: 23422 - protein, 55 aa, Artificial Sequence
  Synthetic
EEVLREIRKLVEESRKILEKVIRDWRRITEELKDRLRRVLEELKKLVDELRKTLT

SEQ ID NO: 23423 - protein, 59 aa, Artificial Sequence
  Synthetic
SDRERLLEEIKDLNRRNKEILERILRRSEELLKKAEDLLDKIKRDSDRAARKVEELKRR

SEQ ID NO: 23424 - protein, 55 aa, Artificial Sequence
  Synthetic
EEVLRRLEKIVRDSERELRRVREEDKKVADEIREKLKRVHDESERIVRELKETLR

SEQ ID NO: 23425 - protein, 60 aa, Artificial Sequence
  Synthetic
KELEDVKKRVDDLLRENERVVRELLESSKRLNEENEEAVRRLDESSKELAKRVKEIKDRG

SEQ ID NO: 23426 - protein, 58 aa, Artificial Sequence
  Synthetic
RDVRRVLEFVKEVIKEIERIHKKVNDDNRKLIEESIRRLKKVLDDNKRVIDELRKTLK

SEQ ID NO: 23427 - protein, 60 aa, Artificial Sequence
  Synthetic
DEEEEVKKRVEELLDELRKSIKKSVDDSKRVLDEARKSVERSREELEKLLRALEDILRKG

SEQ ID NO: 23428 - protein, 56 aa, Artificial Sequence
  Synthetic
LRRLEEEAKRLVEEVRRRDEEHLKRSEELLKEVEERDRELLKRARDLFEDVRRKIE

SEQ ID NO: 23429 - protein, 60 aa, Artificial Sequence
  Synthetic
SEKEEVAKRLEEALKRLEDTIRKVSEENERVLRTLEDRARKSAEKVERLLEELRKRLEDS

SEQ ID NO: 23430 - protein, 56 aa, Artificial Sequence
  Synthetic
LEELKKRVEELTREVEEEIRRLKETSKRLEEEVKRLIEDHDRRVRELKDEVERRIR

SEQ ID NO: 23431 - protein, 57 aa, Artificial Sequence
  Synthetic
DEAREVIKTLRKLLRDSAEILTRVTEEDREVLRELAEIIKKVTDEDRRVLEEARREL

SEQ ID NO: 23432 - protein, 59 aa, Artificial Sequence
  Synthetic
DRILEELLERIKRLHEENKKAVDRWREESKKLKEEVKKKVKEWKDTSEELLRRVKERAR

SEQ ID NO: 23433 - protein, 57 aa, Artificial Sequence
  Synthetic
KEVEEVIKTLRRLSEKLAREHKKVIDELRDLLRRSEEELKRVAKADEDLLDEIRRKV

SEQ ID NO: 23434 - protein, 59 aa, Artificial Sequence
  Synthetic
EEILEEVKERIDRLVKENKEIVDRSRELAKELHDRNREMLTKWLEDSKRLVEEAEKKAR

SEQ ID NO: 23435 - protein, 59 aa, Artificial Sequence
  Synthetic
DKEKEVTDELRKAKRDNDEVVKEIEKESRRLLEEVKETVKRDKKVLRELEEEVKEAKKK

SEQ ID NO: 23436 - protein, 55 aa, Artificial Sequence
  Synthetic
KKVLDEIRKVLTEAKKMHDDVLRRDREVLETARKLSEDSKKENEDVLRKVAEELR

SEQ ID NO: 23437 - protein, 58 aa, Artificial Sequence
  Synthetic
DEERDLERKLEEVIRRAKETSERLNRELERVIEEVRRRHEEAKRRAEEVIRRILKRLG

SEQ ID NO: 23438 - protein, 56 aa, Artificial Sequence
  Synthetic
KDEVDELVERLKRDIDRWAEDVKKLIEDLRRMVERNLREIDKLLKDLKRVVDETKK

SEQ ID NO: 23439 - protein, 60 aa, Artificial Sequence
  Synthetic
SEADKLLDEVRKRVEDMERRLEELVREDRKLVEDHHRDNKRLLDRVKKLAEDMERLIDRG

SEQ ID NO: 23440 - protein, 59 aa, Artificial Sequence
  Synthetic
SEKAEDVRRRLKELAERVRRVVRRVEEESKRTLKELEKSSKELAKKLRDLVETVERRLR

SEQ ID NO: 23441 - protein, 60 aa, Artificial Sequence
  Synthetic
SRVDDLLREAERLAEEHHRLNKKLVDEDRELVRRHHETNRRVLEEVKRLVEEAEKLIRRG

SEQ ID NO: 23442 - protein, 59 aa, Artificial Sequence
  Synthetic
SEEAKRVAERVRRLLERLRESSKRVKETSKETLERLRRSSEKVEEDLRKLIEDVERAAR

SEQ ID NO: 23443 - protein, 60 aa, Artificial Sequence
  Synthetic
RELEELVKRDREEVRKHHELNKELLDRARKLVRDHHERNKRLVREDEELVREAKELIERG

SEQ ID NO: 23444 - protein, 59 aa, Artificial Sequence
  Synthetic
SDEARKAKRESERTLKELEESSREVEKELRRLLKELRESSKKVEDDSRKSLERVERALR

SEQ ID NO: 23445 - protein, 60 aa, Artificial Sequence
  Synthetic
SKADELVKKDREKVEEMERRLRKILREVEELVKEHHERNKRVLDEVKKRVDDAKELIKRG

SEQ ID NO: 23446 - protein, 59 aa, Artificial Sequence
  Synthetic
SRKAEEVEKDSRRTLERVKDVLRKVEETLRELLDRLRESSERVTEALKRLMEEVREALR

SEQ ID NO: 23447 - protein, 61 aa, Artificial Sequence
  Synthetic
SKLEALVKEVEELVKKAKKDLDRLVEEDKKLAEEHHDRNRKLVDTVRELVERAKEDIDRRG

SEQ ID NO: 23448 - protein, 58 aa, Artificial Sequence
  Synthetic
KELEEVVKELRRLLKELEEVVRRVARESEKSLEEVRRSSEEVKKALDKLLKELEDAVR

SEQ ID NO: 23449 - protein, 59 aa, Artificial Sequence
  Synthetic
SELERIVEEVKKLVEDHKKKLKDIVEEVEELVRRHEKKLEDILRRNEKRVRELKEEVRR

SEQ ID NO: 23450 - protein, 59 aa, Artificial Sequence
  Synthetic
RKKAEEVKRRLEELLKEANKASEEVKRTLDKLLEDVNRESERVERASDELLKRLRDDAR

SEQ ID NO: 23451 - protein, 61 aa, Artificial Sequence
  Synthetic
SELEELVKTVKKLVEDHKRRLKELLERARRSTEDLKRKLEKLVRDVRKLVEDAKDAIRKSG

SEQ ID NO: 23452 - protein, 59 aa, Artificial Sequence
  Synthetic
KDELKKVEDALRRLLEELNEVSEEVERALRELHREVEEAIRRVEKELDRLLKEVEDAAR

SEQ ID NO: 23453 - protein, 59 aa, Artificial Sequence
  Synthetic
RELEEILKESEKSVEDIKRELEKIKKKSKTDLEKWKDDLRKIRKEIADLVRKVTREVED

SEQ ID NO: 23454 - protein, 58 aa, Artificial Sequence
  Synthetic
EKVKRVLDELKRSLEEVRRALEEVREVLRESLKRLRDLAEDLKRELRELLKELEERAR

SEQ ID NO: 23455 - protein, 60 aa, Artificial Sequence
  Synthetic
SEKEDVERRIRRLIERLRRMIEELRRRNTDILRKVRELVEEVKKADERSIREVEKLLRDV

SEQ ID NO: 23456 - protein, 56 aa, Artificial Sequence
  Synthetic
LDELIERAERLVREIERKLRKAIEDSKDLLRRIEERLRRLIEKSEKLLRDIKREVD

SEQ ID NO: 23457 - protein, 61 aa, Artificial Sequence
  Synthetic
SEIEKLVKEIEDHLRRLKEEIEKSSRELKKHLDELERRADKIVRDLRRLVEEIKDTIRREG

SEQ ID NO: 23458 - protein, 59 aa, Artificial Sequence
  Synthetic
REAVERLRKALKESKERLKKALEDNRRTLKKSEEDLKKVMEEVKETLDRVKKEVERALD

SEQ ID NO: 23459 - protein, 61 aa, Artificial Sequence
  Synthetic
SEIEKLARDAEEHLRRLLEELRKSSDDLRRHLEELKKKLKEIVDRLKELVDRIKDTIRREG

SEQ ID NO: 23460 - protein, 59 aa, Artificial Sequence
  Synthetic
KKVIDDLRRILEESARRLKRAAERNDETLKESADRLRRAIDRLREVAEKLSRDVRRAAK

SEQ ID NO: 23461 - protein, 61 aa, Artificial Sequence
  Synthetic
SEIEDIARRLREHLEDLKKKIKDSSDELRKHLEEVKRRIERTSEKLTDDVRKIEEKIRKDG

SEQ ID NO: 23462 - protein, 59 aa, Artificial Sequence
  Synthetic
EERIRDLEKILEDSERELRDMARKNRETAERSERELRKVLRENDRTAKKLTDDVRRTAK

SEQ ID NO: 23463 - protein, 61 aa, Artificial Sequence
  Synthetic
DEIDKLVEDVERHLEKLLREIERSSEELKKHVEDLREKLRDLVRRLKEVVDEIRKTVRDKG

SEQ ID NO: 23464 - protein, 59 aa, Artificial Sequence
  Synthetic
KEDVDRLREMLERSRRRLKRAADENRRTAEKSRKELKEVAERVRRALERMRREVEEELR

SEQ ID NO: 23465 - protein, 61 aa, Artificial Sequence
  Synthetic
SEIEEIAKKLEEHVKRVVEEIRKSSEEAKRHVEDVKRKIEELVRELARLVKEIKEAIRRDG

SEQ ID NO: 23466 - protein, 59 aa, Artificial Sequence
  Synthetic
KERIDELREIAKRSRDKLKKVADENRRTLEKSLRDLARAVEELRRRAKRLEEEVRRERT

SEQ ID NO: 23467 - protein, 61 aa, Artificial Sequence
  Synthetic
SDIERLVEEVEKHLKELEDEIRKSSEELKRLAEEISRDIRRTSEELKKLIEDIKDTIRRDG

SEQ ID NO: 23468 - protein, 59 aa, Artificial Sequence
  Synthetic
KEKIDRLRKILEESEKRLEELARENERTVKEVKKEIDDMVRENEETAKRLLDEVRETLR

SEQ ID NO: 23469 - protein, 56 aa, Artificial Sequence
  Synthetic
DELEKLLEDLRRKIRKIKEDLRKTSKENRDELRKSKKRLEDLVREVRRLVEEIRKL

SEQ ID NO: 23470 - protein, 55 aa, Artificial Sequence
  Synthetic
EEVEKTLRELIKEIEKVLEDDERTVRELIERNKELLDRLAKEVDRLIEEIKREAD

SEQ ID NO: 23471 - protein, 57 aa, Artificial Sequence
  Synthetic
SEADKVRKELDDVRRRVKKALDDIRRELEKLVKEVEDALRDHERSNEELVREVREKL

SEQ ID NO: 23472 - protein, 55 aa, Artificial Sequence
  Synthetic
DRVVEEIRDMMRKLKRELERIVEEAKKVVEDLKRRLEEVSRRSADLVRRLKERAR

SEQ ID NO: 23473 - protein, 55 aa, Artificial Sequence
  Synthetic
SDLERVKKDLEDVVRRVEEVLREHKRTNDEIIREIERLIEELRKENERLAREVRD

SEQ ID NO: 23474 - protein, 55 aa, Artificial Sequence
  Synthetic
ERVVDEIRKVVKELEERLRRLSEESRKLVKDIKEKLDKLAEDSRRLVEKLERDAK

SEQ ID NO: 23475 - protein, 61 aa, Artificial Sequence
  Synthetic
REFEELVERVKRVVEELTRRLRETSEETKTVLEKLRKELEEASRRIEDVLRRLTEKIRKDG

SEQ ID NO: 23476 - protein, 55 aa, Artificial Sequence
  Synthetic
EELEETLERLVEAIRDALRKDEETMRRVAEAIRRLLEDHRRSLEEVLEKIRDALR

SEQ ID NO: 23477 - protein, 61 aa, Artificial Sequence
  Synthetic
SEAEKIVEDIRRVIRELKEKLKKTSEDTEDTVRKLSRRLRELAKRSAELVERVTREIRKDG

SEQ ID NO: 23478 - protein, 55 aa, Artificial Sequence
  Synthetic
EELEETLRRVAEEIRRLLEEDRETLRRVERKIREMLKELEEINRRLIKEVDEEVK

SEQ ID NO: 23479 - protein, 61 aa, Artificial Sequence
  Synthetic
DEVEEIVRRIEEVLKDLRRRLETLARESRDLVRKIKEELRRHSDESRRLLERIKERIRRDG

SEQ ID NO: 23480 - protein, 55 aa, Artificial Sequence
  Synthetic
DELKKEADRVKKEIRDMLRKLKKINDDLIREIEEALKDNERTNREIIRRIEEELR

SEQ ID NO: 23481 - protein, 61 aa, Artificial Sequence
  Synthetic
DEAEKIVRDIEETVRRLARELEKHSEDSRRLVERIKEELTRHSKKVADVVRELKKRIKRDG

SEQ ID NO: 23482 - protein, 55 aa, Artificial Sequence
  Synthetic
EELEKRMRRLVKEIERMLEENKRTNEELVREIEEALKKNEETLRRLKREIEEALR

SEQ ID NO: 23483 - protein, 56 aa, Artificial Sequence
  Synthetic
SEAEELVKDAERVVEELERRLRKVSEDIDREVKKIKRELDEHSKRVKETVDDVRRR

SEQ ID NO: 23484 - protein, 55 aa, Artificial Sequence
  Synthetic
EELKKRVEDLIRTIKELIKRHDDSVKEVEKRIREMLERNRKSVEEVIEELKRTSK

SEQ ID NO: 23485 - protein, 61 aa, Artificial Sequence
  Synthetic
SELEELVKEVKELVDRSKEELKKLSEELKKLLDDLIKRIEDLSRRSKRLVEELRRRVEERG

SEQ ID NO: 23486 - protein, 58 aa, Artificial Sequence
  Synthetic
EEMKRVEEELKRLREEDREAVERHDESIRKLREDLRRAVETHKKSNRDLLREVEETVR

SEQ ID NO: 23487 - protein, 59 aa, Artificial Sequence
  Synthetic
DEVEELIRKIEDLLRRIEEKVTKAIRKSERLLEEIKKKIKEMIDKSERLVEEVERRTRN

SEQ ID NO: 23488 - protein, 55 aa, Artificial Sequence
  Synthetic
EDVKRVLKKVADDVERLLRDLERRNRKVREDVKRVLEELRKSNERSIRRIDETLR

SEQ ID NO: 23489 - protein, 59 aa, Artificial Sequence
  Synthetic
REIEEIIKRARELLEEVEEEWRRLIEKSRRLLEELKKRWDKLIEKSKDLLRKIEKTTKD

SEQ ID NO: 23490 - protein, 55 aa, Artificial Sequence
  Synthetic
DELRKILKRVEDENRRLVEEVERSNRRSMEENERLAEEVRRSNKDVIDKIRERLR

SEQ ID NO: 23491 - protein, 60 aa, Artificial Sequence
  Synthetic
DELERLSESVKKAERRIERLNEELNERVKEVTKAIDDLNKRLNDESKRVKEELRKVLARS

SEQ ID NO: 23492 - protein, 59 aa, Artificial Sequence
  Synthetic
EEVIKRVLDDVERAVDEVRKLIEDVLKEHEDILREVKKELDKAIERHKEILKRVREDIK

SEQ ID NO: 23493 - protein, 60 aa, Artificial Sequence
  Synthetic
SVLEDLARKVERVIREAKKVNEELNRRSEEVRRRADEVVADLNRESKKVDDELKKVLARS

SEQ ID NO: 23494 - protein, 59 aa, Artificial Sequence
  Synthetic
EEVARRVVEELKKVLKEIEDEIRRVIERHKEALDEVRRLVKELKDRHDKILREVREKIR

SEQ ID NO: 23495 - protein, 60 aa, Artificial Sequence
  Synthetic
SSEDRLRETVEDVIRRARDANRELNKASRDVEEESKKLNKELNDRSRKVERDLEEVLRRS

SEQ ID NO: 23496 - protein, 59 aa, Artificial Sequence
  Synthetic
EEVIERLIRDLRRVLEEIKREIEEALRDHERVLKENEDMVREILRRHEEILKRMTDEIR

SEQ ID NO: 23497 - protein, 60 aa, Artificial Sequence
  Synthetic
SVLERVADELRKVEEAIDRLNKELNDAVERVERESRRVNKELNDASERVERELDEVLKRT

SEQ ID NO: 23498 - protein, 59 aa, Artificial Sequence
  Synthetic
EEVAKELIDRIRKLLDDIRRKLEEVLKRHEEVLKRNEDTIRKVLKRHEEILEKVKRDIK

SEQ ID NO: 23499 - protein, 60 aa, Artificial Sequence
  Synthetic
SSKERLREAVERVERESDKVNKELNDKSRRVTEELRKLAEELNRRSKEVEEELDKLLARS

SEQ ID NO: 23500 - protein, 59 aa, Artificial Sequence
  Synthetic
EEVIRRLIEELDRLLEENDRRIKKAIEDHKRILEKAEREVREILRRHEKILEDVREEIR

SEQ ID NO: 23501 - protein, 57 aa, Artificial Sequence
  Synthetic
DEEEDLRRAIERVIETVRRLVERVEEESKRVADELRKLTKRLEEVVRKVDEDARKEV

SEQ ID NO: 23502 - protein, 54 aa, Artificial Sequence
  Synthetic
DVKRRLEELLKRAKEVLDELIKRHRDLLRRHEEKVRRLIKRIEDLLRELSKKAK

SEQ ID NO: 23503 - protein, 57 aa, Artificial Sequence
  Synthetic
SKEEELEKIVRKIREDLRRAVKEVEDESKRVLESTKKALDTIRRVSEKVIEDLRREL

SEQ ID NO: 23504 - protein, 56 aa, Artificial Sequence
  Synthetic
VDELVRRLEELLKELRKRLEDLIRRHEDINRRNHELIRRAIEEHRRLLREAREREK

SEQ ID NO: 23505 - protein, 57 aa, Artificial Sequence
  Synthetic
DEIEELIKKLREDLDRSRREVEKNSEDLKELIKRSEERIEKLIEDLERMVDDARRKN

SEQ ID NO: 23506 - protein, 59 aa, Artificial Sequence
  Synthetic
EKLLKKLEDVIDDVRRRDEDVVRKNEESLKRIEKRDEELIRKIEEVIRRAERKVDEVMR

SEQ ID NO: 23507 - protein, 57 aa, Artificial Sequence
  Synthetic
SKIEELIKELEKLSRTNEELVKRVLEELTRLVEESAKRIEDIIRRLKEVVDKARREN

SEQ ID NO: 23508 - protein, 59 aa, Artificial Sequence
  Synthetic
KKLLDKIKKAIEDLERENERALKELEKRLRELLRTDRELIRKIEEEIKKLRREVEEVLR

SEQ ID NO: 23509 - protein, 60 aa, Artificial Sequence
  Synthetic
SIKERLTEVLKRLAEEIRKVIEENKRTVDRAREEVERVIRKNREVLKRIKERADEVIKRI

SEQ ID NO: 23510 - protein, 59 aa, Artificial Sequence
  Synthetic
ERVVEELIREAKKIVEDIVRRVKRHSREVERIVEEIRRRAEEHIERLKRSLEEVEKKVD

SEQ ID NO: 23511 - protein, 60 aa, Artificial Sequence
  Synthetic
RIMEKLEEVLKELRKKIKKLNKDNEETVRRIKKEVDKVIKKNRDVNERIRKRLEEVISRI

SEQ ID NO: 23512 - protein, 59 aa, Artificial Sequence
  Synthetic
EEVVEKLIEDMERVVAESAKENKKHSDDVKRILDEIRRKAEDHIRKTEELLRRIEERTR

SEQ ID NO: 23513 - protein, 60 aa, Artificial Sequence
  Synthetic
SIKEKLTEELERLAKRIREANEDNKRTVEEVEKRIREVIKKNRDSNKEIKDDVERVLSRI

SEQ ID NO: 23514 - protein, 59 aa, Artificial Sequence
  Synthetic
EEVVERLLKKMREAVKKSEDENREHSERVKRIIEKIAREAEEHSKRTKELLDRIREEVR

SEQ ID NO: 23515 - protein, 60 aa, Artificial Sequence
  Synthetic
RVDEDLKRVLDELKKRVEDLNEENKKTVEDISRRVREVIKRNEDMLREVKKRAREAISRI

SEQ ID NO: 23516 - protein, 59 aa, Artificial Sequence
  Synthetic
EEVVRELIKKMRDVVRKSEKDNKDHSERVKRILKRIEERAREHTRRLEEVLRKVEEDVR

SEQ ID NO: 23517 - protein, 61 aa, Artificial Sequence
  Synthetic
RVKEKLREVLERLEREIRKILKDNKETVKRIEEEARRAVEKNKEALKRLEDRVRELLEDKD

SEQ ID NO: 23518 - protein, 59 aa, Artificial Sequence
  Synthetic
EEKVERLAEELRKIVRKIIEDVRKHSEDVRKILEDVKKEVDDHVREMEEIVKRLEDEIR

SEQ ID NO: 23519 - protein, 60 aa, Artificial Sequence
  Synthetic
SELEEIVKEIKRILDEHEKKVRRNSEEMKRIVDRHAERVEKLIREIEELLRRLDELVKRG

SEQ ID NO: 23520 - protein, 56 aa, Artificial Sequence
  Synthetic
EEDLERMAREIKDRLDKIDEENKKSSEELKRELDRLDEKLRDVARRIMEAIDERTR

SEQ ID NO: 23521 - protein, 60 aa, Artificial Sequence
  Synthetic
DELREIVRRIEKILEDHARTIEEVIERIRDILRKHEKLVEEVLRRIEKLLKELEEMVRRG

SEQ ID NO: 23522 - protein, 56 aa, Artificial Sequence
  Synthetic
TEDLERMAERVKRELERLNKKAEDALREVKRALDDLDRDLKRVLEEIKERIRRATT

SEQ ID NO: 23523 - protein, 60 aa, Artificial Sequence
  Synthetic
SELERILTEIEKRIEEHERRIKENSKRMKEIVDDHERKVEEVLRRIRKLLRDLEEMVKRG

SEQ ID NO: 23524 - protein, 56 aa, Artificial Sequence
  Synthetic
REDLEKVARDVEKRLEDANRENEKSSRELKRRLDELDKKLEEEARRIKKAIDDKTR

SEQ ID NO: 23525 - protein, 60 aa, Artificial Sequence
  Synthetic
SEVDEVAKEIRRILEEHEEEIRRNSEEAKRILDEHREKLKRNSDDMRRIVKEIEDMRRRG

SEQ ID NO: 23526 - protein, 56 aa, Artificial Sequence
  Synthetic
EEDLREVAERVKKDLDRLNRENDESSKEIEKDLKRLDDRNRDVSEKLKKEIDELTK

SEQ ID NO: 23527 - protein, 60 aa, Artificial Sequence
  Synthetic
DRLREIVKRIRDILKEHEDRIRENSKRARDILREHKRKIEEVLRRIEKLVEDLERLKRRG

SEQ ID NO: 23528 - protein, 56 aa, Artificial Sequence
  Synthetic
EEDLRRAAEEVKKKLDELNEENERSSEDVKRTLKKLNDELREKVRRVMERIDEAVR

SEQ ID NO: 23529 - protein, 60 aa, Artificial Sequence
  Synthetic
DEVEDVLRKIEKILDDHRKRIEKNSRDMARIIDEHRRKVEENSREMKKLVDDLKKAVDRG

SEQ ID NO: 23530 - protein, 56 aa, Artificial Sequence
  Synthetic
EEELKEVADRVKEKLDRLNRENEKSSEELKRELDKINDENRETSERLKREIDETTR

SEQ ID NO: 23531 - protein, 60 aa, Artificial Sequence
  Synthetic
DELREVVKTIEEILRDHERKVRDNSRRMKEIIKRVKEELERVIKEAKELVERLKEAVRRG

SEQ ID NO: 23532 - protein, 56 aa, Artificial Sequence
  Synthetic
EEDLRKMAEDVKRALDKINRDNEESSRRLKKELDDVLRKVEEVIRRLEEEIDRLTT

SEQ ID NO: 23533 - protein, 59 aa, Artificial Sequence
  Synthetic
SELEKIEEDIRRILKEHKDTVRKNSEDIDRSVKEVKERIDKILKEIDDLLKELRELVER

SEQ ID NO: 23534 - protein, 56 aa, Artificial Sequence
  Synthetic
REDLERVVREVKKELDDINRENRKSSEEAKKKNDDVLAELEKRIREIKRRIDEDAT

SEQ ID NO: 23535 - protein, 60 aa, Artificial Sequence
  Synthetic
SDLEKLVEEIKRLLKELKERVTKNSEDMKREVERHKELVKKLKKRIEDLLRELEDAVRKG

SEQ ID NO: 23536 - protein, 56 aa, Artificial Sequence
  Synthetic
REDLERVVEEVKKEIDKIVEENRDSSRKLKERLDEANEELERRVEEIERRIDEKAR

SEQ ID NO: 23537 - protein, 60 aa, Artificial Sequence
  Synthetic
DELREIVTRADETLKRVADKIEENSRRMEEIVREHERKVRELLKRIEKLVRDLSAMVRRG

SEQ ID NO: 23538 - protein, 56 aa, Artificial Sequence
  Synthetic
EEDLRRVVKRVKETNRRLLEKNKDSSRKLKKRLDEANKTLADALEEVKRRIDERRK

SEQ ID NO: 23539 - protein, 60 aa, Artificial Sequence
  Synthetic
DELDEIVKRAKETVEKVKREVDANSKDIERILREHRKKVDKNSKDMEDLVRKLEELVRRG

SEQ ID NO: 23540 - protein, 56 aa, Artificial Sequence
  Synthetic
EDELREAVERLERENRKVLEENRRSSEKVKRDLDRVNRENEEVSERLKKRIDEAAT

SEQ ID NO: 23541 - protein, 60 aa, Artificial Sequence
  Synthetic
SEIEKIIKELDDLVKEDEDTIRRLEEELRELLKEIDREAKKSDEELEKTLEELAKIARDG

SEQ ID NO: 23542 - protein, 55 aa, Artificial Sequence
  Synthetic
EELRRVLERVAEDSKRTLDRLERVLKEVERRVDEALKRNKTVLDKVREDVKRLKD

SEQ ID NO: 23543 - protein, 59 aa, Artificial Sequence
  Synthetic
REIEEMIKRNEKLLEDDKRKVKRIIEKLDKVLEDDRKRAEDLIRKLEKVAEEIARLRDK

SEQ ID NO: 23544 - protein, 59 aa, Artificial Sequence
  Synthetic
EELLDTLRKVNERVARESEKTIRELEKVLERVNRESKKTIEEVEKALKEVADRVTEVRR

SEQ ID NO: 23545 - protein, 59 aa, Artificial Sequence
  Synthetic
SEIEKLIKENKDLLEEDKRRVEEVIEKLERVIEEDKRRVDEAIKRLDDVAREIERLRKD

SEQ ID NO: 23546 - protein, 59 aa, Artificial Sequence
  Synthetic
EDLLRRLERVNEEVARRSEDTIRRLREVLKKIEDDSRRTIDELREVLKRVKTRVTEVRR

SEQ ID NO: 23547 - protein, 59 aa, Artificial Sequence
  Synthetic
DDIERLIKRNKDLLDRIREEARKLIERLKKVLEDDRRKVERAIERLEEVVDEVRKLKKD

SEQ ID NO: 23548 - protein, 59 aa, Artificial Sequence
  Synthetic
EEVLRKLKKANEDVEREVRKMIEEVRRVLRKVEEDSKRTIKKLKDVLKKVAEEMEKVRR

SEQ ID NO: 23549 - protein, 59 aa, Artificial Sequence
  Synthetic
DEVEEAIKELEDALRKDREAVERMIRDLERLADEDRREVEDHVKKIEELIAAVERMSRD

SEQ ID NO: 23550 - protein, 59 aa, Artificial Sequence
  Synthetic
REVLEKLKEVLKRVEKASRKTNEDVKRVLDEVRRISEETNRRNERVVEEAKERVERVAK

SEQ ID NO: 23551 - protein, 60 aa, Artificial Sequence
  Synthetic
SEVDEVIKRLEELVERHRRKVEEVIRRLEKLAEDHERKVRELEKRLRELIKRIEELARRD

SEQ ID NO: 23552 - protein, 59 aa, Artificial Sequence
  Synthetic
SRDFDRLEDVARRVKEDLERTDEEVRRVAEEVRKRVEKTTRDVERVVREVERAIEERRR

SEQ ID NO: 23553 - protein, 61 aa, Artificial Sequence
  Synthetic
DEAREVIKTLEKLLEEHERRVREVIKRLEELIKRHEDRVREVIETLKRLLEEAEKIVRRDG

SEQ ID NO: 23554 - protein, 59 aa, Artificial Sequence
  Synthetic
SEDMRRLEEVIRKVKEALKRTNDRLREVVDEVKKRLDKTDEDATRVVEEVKKRIDEAAK

SEQ ID NO: 23555 - protein, 61 aa, Artificial Sequence
  Synthetic
DEVETVIRRLEELIREHKEKVDRIIKELEKLLRKHEEKVKKVIEELRRLAKEAADIVRRDG

SEQ ID NO: 23556 - protein, 59 aa, Artificial Sequence
  Synthetic
SRDMERLERVIRKVEEDLDRTNREVEEVIRRVEEEVERLDREAEEVVRDVKEKIDRLKK

SEQ ID NO: 23557 - protein, 61 aa, Artificial Sequence
  Synthetic
SEAEKVIKELRDIVKRNDEVVKEIIRRLEELVKEHKRLVEEIIKRLRELLKRIEEVVRRDG

SEQ ID NO: 23558 - protein, 59 aa, Artificial Sequence
  Synthetic
SEDLKRLKDVLDEVIKKTDELLREVERKAREVTKRLRDLDRRVKEVADEVRRRIREATK

SEQ ID NO: 23559 - protein, 63 aa, Artificial Sequence
  Synthetic
EEEERVKEFLDRVDTEDKKLVEELRKVVERVKRENEKLIKESEDMSKKVEDDARRLIAELRRE

SEQ ID NO: 23560 - protein, 55 aa, Artificial Sequence
  Synthetic
KEVVRKLEEYLRRSRKLVDELKKKLRELLERSREKVERSKEELKRILEEVRKKAK

SEQ ID NO: 23561 - protein, 61 aa, Artificial Sequence
  Synthetic
SVSERLRRVLERVAREVKRLIDEDRKVNEEAEREVRKLIKKDEDALKRVAEEVERLIREAS

SEQ ID NO: 23562 - protein, 59 aa, Artificial Sequence
  Synthetic
EEIIEELIRRLEEIVKRLEEKHRTTVKKIEDIIRELKKTHDKTIEDLRRIIEEIEERVR

SEQ ID NO: 23563 - protein, 59 aa, Artificial Sequence
  Synthetic
RVREELRKVLKRAAEAVERVLRKNEEVLRRAEERIRRLLEENEKSLEKVERDVTRILEG

SEQ ID NO: 23564 - protein, 59 aa, Artificial Sequence
  Synthetic
EEKVKKLIREIEEVIDRLRRESEKHIEEIKEIITRLDKEVKDHDERLKREVDKLEERAR

SEQ ID NO: 23565 - protein, 60 aa, Artificial Sequence
  Synthetic
SVEERLRKVLEEVRRLLEKIIKDNREVLKRAEEKVRELIKRDKDVLDRIAEEVERLKEKG

SEQ ID NO: 23566 - protein, 59 aa, Artificial Sequence
  Synthetic
EEKVDRLIEELKKLIDDAREKNERHIEEIERIIDDLRRKHEETARRLKEAIDRLREEAQ

SEQ ID NO: 23567 - protein, 59 aa, Artificial Sequence
  Synthetic
DKEERIERVLKRVEEELKKLKERIEEVLKKVEDMVRKNLEEIRKVSEDHERTVREIRKR

SEQ ID NO: 23568 - protein, 59 aa, Artificial Sequence
  Synthetic
EKVVEEIIKELERLLEDLKRRADELIKRLEKLVEEHHRKVEELVRRLEESLDKVRRDAK

SEQ ID NO: 23569 - protein, 60 aa, Artificial Sequence
  Synthetic
SEDEKVKRVVEKVKEESDRLNEELKRVVDEVRKELERLIEKIKRSVERMDRTVRELLKRI

SEQ ID NO: 23570 - protein, 55 aa, Artificial Sequence
  Synthetic
DRVVEKLKKALDESRKTHKKLIDDLRRALEELEKRVEDLNRENERLLDEIKKRVD

SEQ ID NO: 23571 - protein, 59 aa, Artificial Sequence
  Synthetic
DVERKIEEVVRDVKRELDRLLEENRRSVERVERALDKLLEDSRRVVEEVKKALDDLRRR

SEQ ID NO: 23572 - protein, 59 aa, Artificial Sequence
  Synthetic
ETDVKKIIEDLRRLVREVEEHSRRTNRRLEELVKDLARHAKRSIDRLKELVDRARERAR

SEQ ID NO: 23573 - protein, 59 aa, Artificial Sequence
  Synthetic
DVEKDIERVVEDVKRELRRLLKEDRDVSKKVKDDLDKLLKESEEVVRRVKKELDRLREE

SEQ ID NO: 23574 - protein, 59 aa, Artificial Sequence
  Synthetic
KSAVDEIIRRLKELVKEMKRHVDKSIKDLEELVRRLEEHIRRSIERLKKLVEEAREDAR

SEQ ID NO: 23575 - protein, 59 aa, Artificial Sequence
  Synthetic
SVEEEVDKVVKKLEEDLDRLLEESKEVVERVEKALDDLLKRDEDVSEEVRRELERLKEE

SEQ ID NO: 23576 - protein, 59 aa, Artificial Sequence
  Synthetic
ESMVKKLLDELRKLVEDAREHVERSIRELEKLVKEADDHVRKSIEDLKRLVEEVRETAR

SEQ ID NO: 23577 - protein, 59 aa, Artificial Sequence
  Synthetic
DVEKEIKDVVDKAKRELDRLLREDREVSREVKEALDKLLEDNRRSVERVERELDDLRRR

SEQ ID NO: 23578 - protein, 59 aa, Artificial Sequence
  Synthetic
ESVVKEILKRLEKLVEDAKRHVEDSIRKLKKLVDDMRKHSERSNRDLERLVREAREKAR

SEQ ID NO: 23579 - protein, 59 aa, Artificial Sequence
  Synthetic
SVEEEIRKVVEEVKRELDRLLEKNDRSVKEAKKELDRLLEENRRAVEEVKKALDELEKN

SEQ ID NO: 23580 - protein, 59 aa, Artificial Sequence
  Synthetic
ESEAKRLIDRLRELVKRVAEHSERSDRELKKLVDDLREHSKRSNDDLRRLVEEAEREVR

SEQ ID NO: 23581 - protein, 59 aa, Artificial Sequence
  Synthetic
SVEDKVREAVRRAKEALKKLVEDDRRVVKEVEEMLDTLLDKNRDSVRRAKEKLEDLKRK

SEQ ID NO: 23582 - protein, 59 aa, Artificial Sequence
  Synthetic
ESDAERLIETLERLVKELEDHVRRSIRKLRELVEEMRDHSRRSDEELKKRLKEVEDRVR

SEQ ID NO: 23583 - protein, 59 aa, Artificial Sequence
  Synthetic
DVEEEIKRVVKKVEEELDKLLEDDERVVREVEEMLDRLLKKNEKVVRDAKRKLDDLRRK

SEQ ID NO: 23584 - protein, 59 aa, Artificial Sequence
  Synthetic
KDVVDKIIETLRRLVKEVAKEVKRSIDELKKTVEEVRKHSEETDRRIEKLAKEAEEEVR

SEQ ID NO: 23585 - protein, 59 aa, Artificial Sequence
  Synthetic
SVEEKIREVVERVRRMLEKLLEDNDRSVKEASKALDDLLRESRRVVEEVKKALDDLRRK

SEQ ID NO: 23586 - protein, 59 aa, Artificial Sequence
  Synthetic
ESEVRRIIRELEELVKRATDHVRRSDKRLRELVDELRKHIRKSIEDLKRLVDEARRRKD

SEQ ID NO: 23587 - protein, 61 aa, Artificial Sequence
  Synthetic
DEVEEIRKELEKLLEEVRRKLEKIIKDIRDLLREDKRKSERIDRELEKLLRRLEEIVRDRG

SEQ ID NO: 23588 - protein, 59 aa, Artificial Sequence
  Synthetic
EEMLREVKRVLEEVRRDIERLLEEIRKVVEEWRKRLEDLKKKNEDSAREVKRRIDELRK

SEQ ID NO: 23589 - protein, 61 aa, Artificial Sequence
  Synthetic
SEVEDIIRRLRELLERHREVSKRINDELRKLLREVEEDSRRLDKEIEDLLRRIREKVTRDG

SEQ ID NO: 23590 - protein, 59 aa, Artificial Sequence
  Synthetic
EDARRRVERVLREVEDTLRKLDKENEDSARRVKEALDRLLKKNEESIRRAEREIDELRR

SEQ ID NO: 23591 - protein, 61 aa, Artificial Sequence
  Synthetic
DDVEELKKEIKKLLDDHKKLSKELNEDIERLLREHRKLSEEIDRRLEKLLKELEELVRREG

SEQ ID NO: 23592 - protein, 59 aa, Artificial Sequence
  Synthetic
KELLDEVERVVREAKKTLDRVDEENKKSIEDAERELERMDRKNEKSVEDVRRTAKELLR

SEQ ID NO: 23593 - protein, 61 aa, Artificial Sequence
  Synthetic
SEAEEIIRRLEELLKKLKKDSDRLDEEIKRLLDENRRNSKDINRRLKKLLDDLRRLVRERG

SEQ ID NO: 23594 - protein, 59 aa, Artificial Sequence
  Synthetic
EDVLRRVEEALRRAEEDLKRLKEKNDRSLKEWRDTIRELKRENEESLRRVKEEADRLSK

SEQ ID NO: 23595 - protein, 61 aa, Artificial Sequence
  Synthetic
SDVERIIEELERLLEDLERRSKRIDEELKRAADRNRRNVEEIIRRLEDLLRRLEELVRRDG

SEQ ID NO: 23596 - protein, 59 aa, Artificial Sequence
  Synthetic
KDVLREVRRVAEKVRRSIKELKERNEKSLRDWKREVDKLLKDIKKVLDEVRKAADDLRK

SEQ ID NO: 23597 - protein, 61 aa, Artificial Sequence
  Synthetic
REVDEIRRRLEKEVERNRRNSKRIDDELKEMADRNRENVKRSIEEIKELLKRLKELVDRDG

SEQ ID NO: 23598 - protein, 59 aa, Artificial Sequence
  Synthetic
EDVRREVERVLKEWEDDVRRLLRKNEDSLREWREKLKKLVREHREVTKKAEEVLRELLR

SEQ ID NO: 23599 - protein, 61 aa, Artificial Sequence
  Synthetic
KDAEDIIRKLDELLDELAKAAREIIERLRDAARENEENSREINRRLEELLKRLEDAVRRDG

SEQ ID NO: 23600 - protein, 59 aa, Artificial Sequence
  Synthetic
EDVKRKVEEVARRVRKAIDDLLRDIKRVLDDWKRKVDKLLEDNRKSLEDVKREAERLRK

SEQ ID NO: 23601 - protein, 60 aa, Artificial Sequence
  Synthetic
SEVERLIKELEDVSRDIKREVTELKRDLKRLAEESKRLVEELEETIRKIVKDIEDTKRRG

SEQ ID NO: 23602 - protein, 59 aa, Artificial Sequence
  Synthetic
KELVDRVEEALRDHERTLRKVVKEVDKALKDLERDNTELVKRVKKVLDELRRDVEEKAK

SEQ ID NO: 23603 - protein, 60 aa, Artificial Sequence
  Synthetic
DMERKLDTVLEEVRRVVTRAKEANDRVLKDAKRVVEELSDRNRRVLEDAKRVVDELKEKR

SEQ ID NO: 23604 - protein, 59 aa, Artificial Sequence
  Synthetic
DEVVDKLLKKLKETLRRMEKESEELLRETEKILRELEKEVEDHLRTVEKTLEDLRREVE

SEQ ID NO: 23605 - protein, 57 aa, Artificial Sequence
  Synthetic
SEVDKILEDSKRKLEEVEEMVRRLLKKSRDLLEKLERDVERLIRDSERRLEEVARAK

SEQ ID NO: 23606 - protein, 59 aa, Artificial Sequence
  Synthetic
KDLRRKLKEVHDRSRRVIEKLREELEKVHDEARKVVEKITEKIERAHDKSRRLLEEIKR

SEQ ID NO: 23607 - protein, 56 aa, Artificial Sequence
  Synthetic
SEVDEFVKRSEDLLKKLEEDVRRIVRESERLLEEVERRVRKILRDLEKKLEDAERE

SEQ ID NO: 23608 - protein, 59 aa, Artificial Sequence
  Synthetic
KELRDKLEEAHRKVKEKVERLMEDLKRAHDESEKKIRDLKRKLREVLERLRKRVEEIKK

SEQ ID NO: 23609 - protein, 60 aa, Artificial Sequence
  Synthetic
DLEKRLEEAIRENRDTIRRLAKELERVIEDNKRRLEELKKEIKKVIEELERELRRVRKDG

SEQ ID NO: 23610 - protein, 59 aa, Artificial Sequence
  Synthetic
REIVDELVRRLKKHSDEARKTVEDLRRKSKKSLREAEETVKRLVEEIERLLEEIKETMR

SEQ ID NO: 23611 - protein, 60 aa, Artificial Sequence
  Synthetic
SEVDELVKKIEDSERRIEEKVKRIEDELKESEERIRTKVRELHKENEKLLEEIRRKKKDS

SEQ ID NO: 23612 - protein, 59 aa, Artificial Sequence
  Synthetic
DELRKTLKDALKRHEEVLKRVEERIRRVLKRHEEVLREAEERIRRSLEKLKRDADRVAK

SEQ ID NO: 23613 - protein, 59 aa, Artificial Sequence
  Synthetic
DEVEELVKELRDSLKRIREVAKELHDRNKELLDRIKRLVDELLKEIEKVLKEIEETKKD

SEQ ID NO: 23614 - protein, 59 aa, Artificial Sequence
  Synthetic
EEVRRKLEEAVREHERELERMAREIRKSLEDLKRVLEEVAERIKEVLRRLEKRVKEVED

SEQ ID NO: 23615 - protein, 60 aa, Artificial Sequence
  Synthetic
DEVEELVERLRRSLEKIRDRVRRLLERIKRLAEKIKRDIERLHKKNEDLAREMRKSERKS

SEQ ID NO: 23616 - protein, 59 aa, Artificial Sequence
  Synthetic
EELRKKLRKVVEDHKRVLEEVKDRLTKVLRELEEVLEKVKRDIKKSLEDLEKVLRELEK

SEQ ID NO: 23617 - protein, 59 aa, Artificial Sequence
  Synthetic
SDVERLLTKLKEVAKDLARIVKRLDEENEKLSEKAEREIRKLDRDNERLLEELEERKRR

SEQ ID NO: 23618 - protein, 59 aa, Artificial Sequence
  Synthetic
DRLRKKLKEVLDDLRRVLEELKDHIRRSLDKNRRSLEELEEHIRRSLTELRRRLEELAK

SEQ ID NO: 23619 - protein, 60 aa, Artificial Sequence
  Synthetic
DEVRELLERIEDEIRRIREEIKKLDEDNKKLAEDIRRKIEELDKENKELLKRIEDKKRES

SEQ ID NO: 23620 - protein, 59 aa, Artificial Sequence
  Synthetic
DEVRDRLRTILKKLREMLKEVKDRIDDSLRRLREVLDEVAKHIERSLKELKDRVREVEK

SEQ ID NO: 23621 - protein, 60 aa, Artificial Sequence
  Synthetic
SDKEEIKKVVDDVRRDIRRLEKELRDLNERFRKRVEELKKRLEEVNDRARREVERLKSRI

SEQ ID NO: 23622 - protein, 56 aa, Artificial Sequence
  Synthetic
VDTLKRRLEDVLRKAREEVEKWKEDLERLLREAERRVREYEEDTRRLLKELEDETR

SEQ ID NO: 23623 - protein, 56 aa, Artificial Sequence
  Synthetic
NVEDEVRRVVTELEKTLREVLKRSKEALDRLRETLERLLKELEDVHREANEDLTRL

SEQ ID NO: 23624 - protein, 59 aa, Artificial Sequence
  Synthetic
ESVVKRLVRELERLLREVEKHLEDSKRELEDLLRRLRERLEELKKRHEDLLREAREETR

SEQ ID NO: 23625 - protein, 57 aa, Artificial Sequence
  Synthetic
SLEETIEEVVRRNKETLDRARKKSEDVLRELERVLRELKRRTDEVARKLKEELDKLD

SEQ ID NO: 23626 - protein, 59 aa, Artificial Sequence
  Synthetic
EDVVRRLLEELERLSRDLERHVKRSEEEARDLLRKAREHVERSVKEIEDLLEDLKREAT

SEQ ID NO: 23627 - protein, 57 aa, Artificial Sequence
  Synthetic
SLEETVRKAVRRNRETLRRLKRESEEAVKEAKEVLDRLREETERVLRKLEKRLRELR

SEQ ID NO: 23628 - protein, 59 aa, Artificial Sequence
  Synthetic
KSMVDELLRTLEKLSDEIRRHVEKSKEDLERLLRELKKHVKRSVEEIEKLLEKLDKEAN

SEQ ID NO: 23629 - protein, 61 aa, Artificial Sequence
  Synthetic
SEVDEILKRIKEVLKRNKENVERIKKRIKEELDRNRKNVERILRTIEKLLKELEDIARREG

SEQ ID NO: 23630 - protein, 59 aa, Artificial Sequence
  Synthetic
EELRKKVKEVMDRWRETLDRLREEVERVLEDWRRKLEELRRRVEKVLRDAERVIKKVEE

SEQ ID NO: 23631 - protein, 57 aa, Artificial Sequence
  Synthetic
SEREEIERVLDENRRSLEELEREVEDALRTWEEELKKVEEAVRKVLEDVRRELEKDL

SEQ ID NO: 23632 - protein, 56 aa, Artificial Sequence
  Synthetic
VEKIKTEVDDLSRKLRETVERLKTELKKVIDRNRKTLEDLERRARKLIKEARDAAK

SEQ ID NO: 23633 - protein, 57 aa, Artificial Sequence
  Synthetic
REREKIEDLLRRNEKSLRDVARAVERILEEWRKVVEDLTERNKELLKEVEKVVRELL

SEQ ID NO: 23634 - protein, 56 aa, Artificial Sequence
  Synthetic
VDEIAKELKRLSDKLREMLKRLTDKAKRLIERNEKTSRDNERELRKLIKEAEDAAT

SEQ ID NO: 23635 - protein, 60 aa, Artificial Sequence
  Synthetic
SKEERLERLIEENKKSLDELSKRVEEVIKENKDVLKRLKEKIERLIEKNRRELERLKKDV

SEQ ID NO: 23636 - protein, 55 aa, Artificial Sequence
  Synthetic
EELERELRDHSRRLKEIVERIERKVREHIRELEKIVKEVEREVEEHIEKLERTVR

SEQ ID NO: 23637 - protein, 59 aa, Artificial Sequence
  Synthetic
SDEDRLRELLKKNRESLKRLSDEIRRLIEENRDALRRVKETIKELLRKLKEVVERVRKD

SEQ ID NO: 23638 - protein, 55 aa, Artificial Sequence
  Synthetic
EEVRKTLEEHSRDLRRKVEELAREVKRHIRELEKILKEVKDEIEEVIRRIEETAR

SEQ ID NO: 23639 - protein, 59 aa, Artificial Sequence
  Synthetic
SEIEDAAEKVRRNSEEAKRILDEHRERVKRVLEEIERLVKRAEERIEELIRTIERLRKD

SEQ ID NO: 23640 - protein, 59 aa, Artificial Sequence
  Synthetic
EEVRKKLEDILRKNEETSREIKKRLDRIDDDLRRVLEKAAKRLRDLLEKLREAVRRVET

SEQ ID NO: 23641 - protein, 59 aa, Artificial Sequence
  Synthetic
SEIEKVKKEVEENSREAKRIVDEHKRLVEENSKEMEKLLKEAEDTIRKLLKEIKELKDR

SEQ ID NO: 23642 - protein, 59 aa, Artificial Sequence
  Synthetic
ERMREKLRRALEENRRTSERLKRKLDDIDRDNERTSREVKEKLKRILEELKRTLEEVER

SEQ ID NO: 23643 - protein, 59 aa, Artificial Sequence
  Synthetic
SEIDKARDEVRKNSDEMRKIIERHREKVEDNSRRMKETVRRVEEEIERIIREIEELKKR

SEQ ID NO: 23644 - protein, 59 aa, Artificial Sequence
  Synthetic
RRLREELRRIAEENKKTSDDLKKRLDRIDKENERTSEELKEENDRLLEKLRRAADRVKR

SEQ ID NO: 23645 - protein, 59 aa, Artificial Sequence
  Synthetic
REIEEFEKDVRRNSEDMERIAREHEKLVRDLLRELKRLVDDLKRRLEELAEEIKSLREQ

SEQ ID NO: 23646 - protein, 59 aa, Artificial Sequence
  Synthetic
ERLRERLKRILDKNKETSDRIKKRLEDLNRELERVARELKKTIDELLRELEEVVERVRK

SEQ ID NO: 23647 - protein, 60 aa, Artificial Sequence
  Synthetic
SLEEEVKKLLEELKKVADKLTKEVREADKKLEEVLRRVKRRLDEVDRRLEEEIKKVKSRI

SEQ ID NO: 23648 - protein, 59 aa, Artificial Sequence
  Synthetic
EELLERLKRRIDRLIEEARRLVEKWRDELKKLIDEVRKLVEDHERKVRDIEKKVRDESR

SEQ ID NO: 23649 - protein, 59 aa, Artificial Sequence
  Synthetic
DAEEKARRVLEELDEALKRLAKKIKESIDKLKDVLRKLAEIIKRSLDELDEVLKRLASK

SEQ ID NO: 23650 - protein, 55 aa, Artificial Sequence
  Synthetic
EEILEELRRALEELKREVDELDRRNEEALERLKERVKRLNEDNRRTLERLEREVD

SEQ ID NO: 23651 - protein, 60 aa, Artificial Sequence
  Synthetic
DVEELLRRLLEELRRVVKEVEDINRRSLEEARRVLKRLEDDHRRVLKELEDVLERLRRQG

SEQ ID NO: 23652 - protein, 59 aa, Artificial Sequence
  Synthetic
RETIEELLRKVDRDLKRIRTTSEDLVRKNEELLEKLERESRRVVEESRKRLKEAEERTR

SEQ ID NO: 23653 - protein, 59 aa, Artificial Sequence
  Synthetic
SVEEKLKDLEKENKDSLDEIRKLNEDSLEEAKRVLKKLEDTHRTVLRKLEKVLDELRKR

SEQ ID NO: 23654 - protein, 59 aa, Artificial Sequence
  Synthetic
DDAIRKLRKKVEDTSRDLKRTSDDLVRRNRKLLKELEEESRKVVKESDEILRKMKEEVR

SEQ ID NO: 23655 - protein, 60 aa, Artificial Sequence
  Synthetic
SVEEKLDELEKRIKEVLERIERINEESLRRAEEVLRDLEETNRRALERVRDVLRRLEERG

SEQ ID NO: 23656 - protein, 59 aa, Artificial Sequence
  Synthetic
DDAIRKLLETVDRRLKELTETSKRLVEENRDLLRRAKEESKRLVDESEKVLEEMDRETR

SEQ ID NO: 23657 - protein, 59 aa, Artificial Sequence
  Synthetic
SADETLEELEKELRRVVDEVRRTNEEANKRLREVLRKLEKKNDDVLRDLERVLKELEDR

SEQ ID NO: 23658 - protein, 59 aa, Artificial Sequence
  Synthetic
EETIKKLREDVKRELDRIKTSSKKLVDDIERRLRRMEEESRKLAEDSRRILEEMRKEVT

SEQ ID NO: 23659 - protein, 56 aa, Artificial Sequence
  Synthetic
SEVEKLVDEIKKELKRLRETSKKLLDEIRELLERLKRSSKKLVDDIKRILEELKRR

SEQ ID NO: 23660 - protein, 56 aa, Artificial Sequence
  Synthetic
KDKLEKALRDARKVVEDIERTNREILKRVRDMVERIREDNDTVLEEVERMAEEVRK

SEQ ID NO: 23661 - protein, 61 aa, Artificial Sequence
  Synthetic
REIEELKKKVEKVLRELRKSSEEMKRRVEDLIRRLKKSSKDLERKVKDLLKKAEEKVRRDG

SEQ ID NO: 23662 - protein, 59 aa, Artificial Sequence
  Synthetic
EEARRRLEEVVRRLRKVLDDVRKINKEVVDRLKKALDEVKRTNEDVVRDLRKVLEELKT

SEQ ID NO: 23663 - protein, 59 aa, Artificial Sequence
  Synthetic
SEIEKLKEEIRRLLEEIKRHAEENKRRVETALRDIERHVEENTRRVAKVEEEIKKLKDR

SEQ ID NO: 23664 - protein, 56 aa, Artificial Sequence
  Synthetic
KDELDKVEEEAKRVAEEVKEIHDRVLEEVRRVVDRVLKAHDEVLRRLERVVREVKR

SEQ ID NO: 23665 - protein, 60 aa, Artificial Sequence
  Synthetic
EEEKRLRELEKRNEDVIRKAAEDVREILRKNEEVLKEAEDRIKRLIDEDRRVLEEVKRDD

SEQ ID NO: 23666 - protein, 55 aa, Artificial Sequence
  Synthetic
EELEREVRKHDKEVKEVIDRLREKSERHIREIERIVDELRKKHEATVRKLKKDVK

SEQ ID NO: 23667 - protein, 60 aa, Artificial Sequence
  Synthetic
DEDETLRELEKKNDKALDDARRTIEEVIRRNEEVLKRAAEEIEKLERKNKRVLEEVKRRD

SEQ ID NO: 23668 - protein, 55 aa, Artificial Sequence
  Synthetic
EELAEEVKRHDDRVRKEIEKLKREVEKHDREVKETIDRLAKKVDDHLKELRDTTR

SEQ ID NO: 23669 - protein, 59 aa, Artificial Sequence
  Synthetic
DEIKEIEETVERLVEELKRIVEEWREESKRNVDELEKRIRDIKRRIDEAIKTLEELKRR

SEQ ID NO: 23670 - protein, 60 aa, Artificial Sequence
  Synthetic
VEELRRALDELLEKARKVVEEVEKMIKEVNDRNKKVVDELKRTLDKILKDLEEVAREVDR

SEQ ID NO: 23671 - protein, 59 aa, Artificial Sequence
  Synthetic
SEIEKMKRDSDENIKRMEEIARKWEKESRDNIREIEKRVEDLKRRIEKVIREIEKLRRD

SEQ ID NO: 23672 - protein, 60 aa, Artificial Sequence
  Synthetic
LEEAKRKLEEVLDKNRRVVEKVERRIDRINDRNREVLERAEKELDDILRKLEEVVRRAEK

SEQ ID NO: 23673 - protein, 61 aa, Artificial Sequence
  Synthetic
DEIREAKKRLDDIVTELRDHIRRSKERHERLVKELERHIRELEKKVRELIKRLDDAVRRDG

SEQ ID NO: 23674 - protein, 59 aa, Artificial Sequence
  Synthetic
EEVKREITRLLEDLKRVSREHREEIRKLLETTREVSKRHREKVEDLLRKLEEVLERVRT

SEQ ID NO: 23675 - protein, 56 aa, Artificial Sequence
  Synthetic
SELEEIARLAEEIERKLRESLRESDKMHKKLNKENEDLLEKIRKEVEDIIKKLRDL

SEQ ID NO: 23676 - protein, 59 aa, Artificial Sequence
  Synthetic
ERVEEAVRRVVEKIKDVVEKHSDASRRLNEELKESVDRLRREVEKLVEKIRKVVEDLRK

SEQ ID NO: 23677 - protein, 60 aa, Artificial Sequence
  Synthetic
SDLERVEKESRDHIDTLRRIVERVEEHVRRSIKTLDELVDRARRSVERLIEELEEMKRKD

SEQ ID NO: 23678 - protein, 59 aa, Artificial Sequence
  Synthetic
RRVEEELRRLLEENRRVVEEVEKELDRLLKESEDAVRRVEEALDRLLKELERVAKEVKD

SEQ ID NO: 23679 - protein, 60 aa, Artificial Sequence
  Synthetic
SDLEKVKKDSDDHIRELERLVRRAEEHVRDSVRRLREIVEELDRDVRRLIEELKDLKRKI

SEQ ID NO: 23680 - protein, 59 aa, Artificial Sequence
  Synthetic
EDVKKKLDDLLRENREAVKRVERALDKLLTDDRRVVEEVERALDELLKRIEKVAREVEK

SEQ ID NO: 23681 - protein, 60 aa, Artificial Sequence
  Synthetic
RDVDELRKESEDHIRELRKLVEDVRRHVKRTNDDLERLVKEVDDTLKELIKEVKELKRRV

SEQ ID NO: 23682 - protein, 59 aa, Artificial Sequence
  Synthetic
EDVKKKIKDLLDTNREVVERVLRTLRDLLRRNKEVIDRILETLDELLERVKREIEKDAK

SEQ ID NO: 23683 - protein, 60 aa, Artificial Sequence
  Synthetic
DDAERAKEESERHIKRLKDLVEELRKHSERTDEEIKELLRRLEKTVRDLIRELERLKEEI

SEQ ID NO: 23684 - protein, 59 aa, Artificial Sequence
  Synthetic
EDVKRKLDKLLKENEDVVREVDRALKELLRKNAEMLERAKERLDRLLEEVKKVADEVRR

SEQ ID NO: 23685 - protein, 60 aa, Artificial Sequence
  Synthetic
SIEEELERLLRKNEDSLRRVRDEIRRLEEEIRRVLKKWRDEARKLLREIERVLKEVAERK

SEQ ID NO: 23686 - protein, 59 aa, Artificial Sequence
  Synthetic
ETLLRDLERKSKEVDERLEELLRRAKERVEELIREIEALLDRNRRNVERLIRELERRTD

SEQ ID NO: 23687 - protein, 61 aa, Artificial Sequence
  Synthetic
EELERLLEDVKRTLKELRDRAKEVLDRVRKTLEELKRELKRVLDEVTELLERLRRIVKREG

SEQ ID NO: 23688 - protein, 56 aa, Artificial Sequence
  Synthetic
KRIIKEARERVETVNRETKKILEEIARTVEKVDEESRRILEKVKRDAERVLREIKK

SEQ ID NO: 23689 - protein, 60 aa, Artificial Sequence
  Synthetic
DELEEVEKEVKRILEESRRLLEELEREVRELLERSKRILEELEEEVRRLLEKLKRVRTRG

SEQ ID NO: 23690 - protein, 55 aa, Artificial Sequence
  Synthetic
EELERLKRELDKVHEEVREKVERAKRELERVHKRSEEEARRLKEEVDKVLDELRK

SEQ ID NO: 23691 - protein, 59 aa, Artificial Sequence
  Synthetic
SELDELRKRVEEIVEENDRVLRELEKRVRELSERNKKTLKELTKRVREILERLKELKDR

SEQ ID NO: 23692 - protein, 59 aa, Artificial Sequence
  Synthetic
EEVKEVVRRLEEKVKESLDRAEKVLRRLEREARESNRRHEEEVRRLKEEIDRVVTELRR

SEQ ID NO: 23693 - protein, 58 aa, Artificial Sequence
  Synthetic
SLEDVLREVEERIRKSLEEHRKVTDEAEKELRRIVEDHKRVLEEVKKEIEDVIKELKK

SEQ ID NO: 23694 - protein, 60 aa, Artificial Sequence
  Synthetic
KEKVAREIRETVKKLHEDNRRMSEEIKKTVERLLDKLRRSLERIRREAKDLVRKIEDLRR

SEQ ID NO: 23695 - protein, 58 aa, Artificial Sequence
  Synthetic
KLEEVLRKVAEDIKRSLEDLKRVLKEVADHIRRSLEELRRVLERVKKEIEDVLRELEN

SEQ ID NO: 23696 - protein, 60 aa, Artificial Sequence
  Synthetic
ADKVAEDIRRDVRRLDEENRELAERIKRAIEELDRKNKDLARRIEDAVRRLLEKIKEAVR

SEQ ID NO: 23697 - protein, 58 aa, Artificial Sequence
  Synthetic
DLEEVLKEVEKRIRDSLKDLKRVLDEVLDHIRRSLKENRDSLRKLEEDLRRVLEELRR

SEQ ID NO: 23698 - protein, 60 aa, Artificial Sequence
  Synthetic
EKKVAEKIRKEVKELDEKNKELARRIRDVAKKLDERNKDVSRRLAEEVERLLRKIKEKVR

SEQ ID NO: 23699 - protein, 58 aa, Artificial Sequence
  Synthetic
DLERVLEKVARDIEESLRRNKESLKRLKEHVEESLKENRKSLEDLRKKLKDVLDELKK

SEQ ID NO: 23700 - protein, 60 aa, Artificial Sequence
  Synthetic
KKKVADKIREEAKRLDKENREASDRARDVVRRLDEKNKKLSEEMKRTVERLLETLDRKMR

SEQ ID NO: 23701 - protein, 58 aa, Artificial Sequence
  Synthetic
DLERFLEEVARKIEKSLEELRRVLEEVRDRIRRSLEENTKSLERLTEEVRRVLERLKD

SEQ ID NO: 23702 - protein, 60 aa, Artificial Sequence
  Synthetic
EDKVAKEIEDEVRRLDEKNRKLAKEIRDEIRKLDKENKDLSKELRDRVEELLRKIEETVR

SEQ ID NO: 23703 - protein, 59 aa, Artificial Sequence
  Synthetic
KAAEEIRKKVEDYKRESEKILEEVEDHSRRSKETLKRLLDDLRRAVEELKRRLEELKRR

SEQ ID NO: 23704 - protein, 56 aa, Artificial Sequence
  Synthetic
REVADELKKRLKRANEESERVLRELAERNKTALEEAERVLRRLKEEIEKVLRKLKK

SEQ ID NO: 23705 - protein, 59 aa, Artificial Sequence
  Synthetic
SEVEDLRRRVEEIKRRVEEILRENKEVSEKSIRELERLLEELKRLVDELLKRLEELKRE

SEQ ID NO: 23706 - protein, 59 aa, Artificial Sequence
  Synthetic
DDLRRALKDVVDEVKKVVDELREENDRLRKENKRAVDEVRKELERLLRDVERVIRRAEK

SEQ ID NO: 23707 - protein, 59 aa, Artificial Sequence
  Synthetic
EELDRLRRHADESRKRAEEILKRNEEEIRRLVEELKRILKTNEDVLRDLEKKLEDLKRR

SEQ ID NO: 23708 - protein, 59 aa, Artificial Sequence
  Synthetic
DKLRTTIDEVRRRSKKVLDDLRDRNRRLLEEVDRAIKEVRETNEELLRRLKRVIDEVRR

SEQ ID NO: 23709 - protein, 59 aa, Artificial Sequence
  Synthetic
SAEELLRTIEKRIEDNHRRLEEILEEIARLIEDMLRTDERIVREIKELLKEVLDRVRRA

SEQ ID NO: 23710 - protein, 59 aa, Artificial Sequence
  Synthetic
EEVVKKLVEDVERELERSLREAEDLLRRVEEVIRTSKKESKDVLEKIERLLRDLERRTR

SEQ ID NO: 23711 - protein, 59 aa, Artificial Sequence
  Synthetic
SVAEELKKEVDDLLRDLKKKLDDVRRDHERLLRELEEHLERSRERVERLLRTLEDVARK

SEQ ID NO: 23712 - protein, 56 aa, Artificial Sequence
  Synthetic
RKVIEKIERDIRKILKEVEEVLRTLKKKSDEILERAKRVTEKIERDVTEILERIKK

SEQ ID NO: 23713 - protein, 59 aa, Artificial Sequence
  Synthetic
SVADELRKTAEELLKRLREHLDTSRRRVEDLLRRNEKKLRDVLREVKKLLDELRELKER

SEQ ID NO: 23714 - protein, 56 aa, Artificial Sequence
  Synthetic
EDVIREIKDRVRRILDEARRVSEKLRRDVEKINRESREVLERIKELIKRILKEAKD

SEQ ID NO: 23715 - protein, 57 aa, Artificial Sequence
  Synthetic
SELEELLREVDDSLKKLETEAKKLLDEVRDSLRKLEETLRRVLREVEEELKELEKEN

SEQ ID NO: 23716 - protein, 59 aa, Artificial Sequence
  Synthetic
KRVEDVLREIRRRAREINERLKKILKEAKEVAEKVNEETRRVLKEIKELIERVLRELRK

SEQ ID NO: 23717 - protein, 60 aa, Artificial Sequence
  Synthetic
REAEEAKEEVEELNRRNKKELDDARRRVDELDKRNKDRLKESSDRVKRLVEELERVKEEG

SEQ ID NO: 23718 - protein, 56 aa, Artificial Sequence
  Synthetic
KDVLKRLAELIKESIRELERVLEELAEKIDRSLKELDDVLRKNETDLKRVIEDLKR

SEQ ID NO: 23719 - protein, 60 aa, Artificial Sequence
  Synthetic
DEAEKAKRDSEKVVEDNRKMLEDSTRRAERLNEENKKELKKSTEEAEKILREIDETKRRG

SEQ ID NO: 23720 - protein, 56 aa, Artificial Sequence
  Synthetic
DEVLKRLKEEHRRLIEELEEVLRRNEEIIRRSIEDLERVLDRNRRELEDVIRRLKE

SEQ ID NO: 23721 - protein, 60 aa, Artificial Sequence
  Synthetic
REAEEVERKVEELNRRNRKVLDDARKESEEVVRRNREFLRRLEERVRTILRELDKRKRDG

SEQ ID NO: 23722 - protein, 56 aa, Artificial Sequence
  Synthetic
DEVLRRLAEDIERSIRELEKVLRELERIHRELIKELKEVLKRLEKDAKEVIERLRT

SEQ ID NO: 23723 - protein, 61 aa, Artificial Sequence
  Synthetic
SLAEEIDKTIRELAKRHEKTVEDIKKIITELEKKHRDTAEELERIVREIEKKIRELKKRLK

SEQ ID NO: 23724 - protein, 59 aa, Artificial Sequence
  Synthetic
EELERVLREAEETLRRLIEKDEKVNREADEKSERLIREDEKVLEDVAREVERLLRELDK

SEQ ID NO: 23725 - protein, 61 aa, Artificial Sequence
  Synthetic
DEDREARELVERLREEHRRTAEEIKKIIEDLERKHRETMERLKRIIEKIERDIRRLKRDLK

SEQ ID NO: 23726 - protein, 59 aa, Artificial Sequence
  Synthetic
KELERVLEKVARDLKKLVDDDRRVNETANRRSRKLIEDDKRVLEEAAKEVKRLLDELDK

SEQ ID NO: 23727 - protein, 56 aa, Artificial Sequence
  Synthetic
DTERTVKEKIRKWKEDVERVERRLEELVDRARKLSKENVDRMRELVRRLEDRVRKD

SEQ ID NO: 23728 - protein, 56 aa, Artificial Sequence
  Synthetic
REVLEDARRKIDELNERVERVAETVRRKLDKILEDNKRVVERVKEEIRRVLEELER

SEQ ID NO: 23729 - protein, 59 aa, Artificial Sequence
  Synthetic
SEEEVLREAAKTVEKLLDEIRRSLEKVSKRVEDSNRELKESLDRVRERVRELLEELRKN

SEQ ID NO: 23730 - protein, 56 aa, Artificial Sequence
  Synthetic
KDDVERTLREIAKLVDEVDKENKRALRENEERVKTLNRENEEMLKRIEEEVRRATK

SEQ ID NO: 23731 - protein, 59 aa, Artificial Sequence
  Synthetic
DLEEVAKEVKKALDELLKRNEDSARRVKEAIRELLKRINDVTREVEETLDRLLKEVEDG

SEQ ID NO: 23732 - protein, 60 aa, Artificial Sequence
  Synthetic
AERVVKRLEELLREAAEHSKRSNDELERLLDRLRREVERYERELEKRKKEAKELADKLRK

SEQ ID NO: 23733 - protein, 59 aa, Artificial Sequence
  Synthetic
DLERRLDELLKRIEDRVRELVRTLEESLRELERRVREIIRRLEEHLRRIEKMVRDLKRA

SEQ ID NO: 23734 - protein, 56 aa, Artificial Sequence
  Synthetic
ERVIKKAEEDVRRLLREIEEVSERHKREVDRLEREIEEVSREHKERVEKLLREIER

SEQ ID NO: 23735 - protein, 59 aa, Artificial Sequence
  Synthetic
KLEEDLKRILDELRRMAKEIIDRLEDHLRKIKKDVDKLSKENKDHLKEIEDTVRELKRN

SEQ ID NO: 23736 - protein, 56 aa, Artificial Sequence
  Synthetic
ERVIKRVDEEVKKLAEEIRKVSEEHEKRVKKLLKEIEKSSEDHRRRVEELLREIDR

SEQ ID NO: 23737 - protein, 59 aa, Artificial Sequence
  Synthetic
SEEEEVEEELERHHRDVEEYVKRLKELLDKLRRKNETTVRDIARLAKKHHDDVDELKKR

SEQ ID NO: 23738 - protein, 55 aa, Artificial Sequence
  Synthetic
REVLKRFKDKVKENRDESERVHREIKERLEELKRKNEDVLRKVKKILDDNEERLR

SEQ ID NO: 23739 - protein, 57 aa, Artificial Sequence
  Synthetic
KDLEKLVEDIRRLLEELKKTVEDNKREIKELLDRLREKVKENLKRHKELNKRLRDTG

SEQ ID NO: 23740 - protein, 59 aa, Artificial Sequence
  Synthetic
KEVKDRIEEVLRELREAVRRHHEKVKEVLRELKEALDKHHKDVTDSLRDVERLVEEARR

SEQ ID NO: 23741 - protein, 58 aa, Artificial Sequence
  Synthetic
SEKEILDEIRDRIRKLLEEIKDYLEKSKKKIRDLLEKIKKVLEDNKERVDRLLDVIRK

SEQ ID NO: 23742 - protein, 55 aa, Artificial Sequence
  Synthetic
DDVRREAKRLLEEVAEAVRRIHETSKRLLERVDEEMKRVEETIRKTNKEVEDAKR

SEQ ID NO: 23743 - protein, 57 aa, Artificial Sequence
  Synthetic
SDVEKLIRDAEKKMDDFRKDSERLVRELEEKLKRHEERVRDLLRELKELLEEVRRKD

SEQ ID NO: 23744 - protein, 55 aa, Artificial Sequence
  Synthetic
EKIKEAVDRIKKALRDSHKELAEVVERIKRKLDETNRELKDEARKIKEELRRVEK

SEQ ID NO: 23745 - protein, 60 aa, Artificial Sequence
  Synthetic
SEVETVKKRLEDSTKESEDTVRKVKRELERLIERSEDTLRRIKKRLDDLIRTIEDLKRRG

SEQ ID NO: 23746 - protein, 59 aa, Artificial Sequence
  Synthetic
KELLDTLRRLLEENKRRHKETVDEIERLIKEVERANREILTRIKKALDDVRRAVEEIKR

SEQ ID NO: 23747 - protein, 60 aa, Artificial Sequence
  Synthetic
REVEEVLRKVREDSKRNKDELKRLLDEARKESEDNKRDLEKLLKEVREEVRRVEEILRKT

SEQ ID NO: 23748 - protein, 55 aa, Artificial Sequence
  Synthetic
EDVLREIETLLDKNHKDNKKVLDDIRELLKENADRNRRVLEEIKKLVEDVERKVK

SEQ ID NO: 23749 - protein, 58 aa, Artificial Sequence
  Synthetic
DEDEKALREIKKLIEDNERLNREVNERIERLIDRARRLMERVNREIERLIKEVRERLG

SEQ ID NO: 23750 - protein, 58 aa, Artificial Sequence
  Synthetic
EELEKTLRDIRKRSKEDADKVKKSLEEVEEEIRRIEKRLRESLKKVEDDIERIRREAT

SEQ ID NO: 23751 - protein, 56 aa, Artificial Sequence
  Synthetic
SEIEKLTKEIRDLIRTSREEIKKLMEELERNVREAEESIKRLLEKAEELIRRIAEE

SEQ ID NO: 23752 - protein, 56 aa, Artificial Sequence
  Synthetic
KEDVKRELERIKKSSDDVRKKVEDESRKHREEVERLERELDRKLEDIRRKVEETKT

SEQ ID NO: 23753 - protein, 61 aa, Artificial Sequence
  Synthetic
SEIEKLAEDVERIAKKIEDVVRELRKANEDIIKEVRDINKELRDKVEEILRRIEKIVRDRL

SEQ ID NO: 23754 - protein, 59 aa, Artificial Sequence
  Synthetic
KEILDRIRKKLRETLERVRDRLRKYLEDLERRLEELRREHRKTLEELKEKLKRLADRVK

SEQ ID NO: 23755 - protein, 57 aa, Artificial Sequence
  Synthetic
SEVEDLERRAREVNKRIKDLIDRLRERVRKIEEDIRRLNKELKEEVDKIIEEIRKDG

SEQ ID NO: 23756 - protein, 58 aa, Artificial Sequence
  Synthetic
KLIEELLREHEKMLKEIEDRIRKIERELDELLKTLEDKHREILDELEKELRKAKERRR

SEQ ID NO: 23757 - protein, 60 aa, Artificial Sequence
  Synthetic
SDIERILEENEKTNRENRKRIEDIRRELEERLDRNRRRIEEILRRAEKMLEEIEDIFRRS

SEQ ID NO: 23758 - protein, 59 aa, Artificial Sequence
  Synthetic
EDKLRDLKKKLRDSLRTLEELHRKLKKDLDEILRRLEELHRKLKEDLDRILKAVRDTAK

SEQ ID NO: 23759 - protein, 60 aa, Artificial Sequence
  Synthetic
SEIEDIKRRNEENNRRNKKRIDDILEELKRRVEENRRRLEDIERKLREDKERLKDIFRRS

SEQ ID NO: 23760 - protein, 59 aa, Artificial Sequence
  Synthetic
EDKLRKLEEDLRRSLETLREIHRKLKEELDRILEELKRLHERLKRRLDEIADEVARTAR

SEQ ID NO: 23761 - protein, 60 aa, Artificial Sequence
  Synthetic
SDIEEIERRNRENNERNKRRIEEIEKRNREENKENEKDIERILRRAEELLKRAKEILRES

SEQ ID NO: 23762 - protein, 59 aa, Artificial Sequence
  Synthetic
EKKLRELKKKLDDSLRTLEELHRELMKRLDESLKTLKELHDELKERLDRILKEIRDDAK

SEQ ID NO: 23763 - protein, 60 aa, Artificial Sequence
  Synthetic
SELEKTLEDLKRHSEENKKKLEEDLRDMERNLKENKDRLKKILEEAEKTLKDLERRFREG

SEQ ID NO: 23764 - protein, 59 aa, Artificial Sequence
  Synthetic
KDKAEELERRLDELVKENREIHERVKKALDDIVKELEELHERLKRRLEEILRRIAETVR

SEQ ID NO: 23765 - protein, 57 aa, Artificial Sequence
  Synthetic
SSVERFEKAVKESIENIRRLLEELEREIRESMKHLRELVKELKEALDRIVERLRRTV

SEQ ID NO: 23766 - protein, 55 aa, Artificial Sequence
  Synthetic
EEDLKRLDKENKDIEKKIRDLVKEARDENRKLKRDIERTLRELEERLKEVEDRET

SEQ ID NO: 23767 - protein, 57 aa, Artificial Sequence
  Synthetic
SDIEKRLEENERHNERSEERIRELLKELEDHLRRTKREIEKKLEDLKRLLDRLREED

SEQ ID NO: 23768 - protein, 58 aa, Artificial Sequence
  Synthetic
EELKRVKDELDKSLKHSRELIERAKERLEEIKKRSKELVDRAEKRLDEILKEVKDDFD

SEQ ID NO: 23769 - protein, 57 aa, Artificial Sequence
  Synthetic
DEIKEREDDVKRHLDRTREEIEKLLKEMEEHTERSRRKIKKVAEDAEERLRKVEEEN

SEQ ID NO: 23770 - protein, 58 aa, Artificial Sequence
  Synthetic
KELEEVKRKLDRILEESEKLVREAEKRLDELLKDNKRLVEELEKELDRILEELRKRVD

SEQ ID NO: 23771 - protein, 57 aa, Artificial Sequence
  Synthetic
DSIEDLERRAKESDDHLEKLIRELRDELRRSLETVRRNIEDLRRTLEEVLRRLEEDG

SEQ ID NO: 23772 - protein, 59 aa, Artificial Sequence
  Synthetic
EEMLREIKKELEETNKRAEDDVRKIREELREHNERHKERSKRIKEELKRTLDELKKKRK

SEQ ID NO: 23773 - protein, 60 aa, Artificial Sequence
  Synthetic
SRIETLVRRMKELLKEVEDKSEKSKRRWEDRLKKVAEDSKRRVEEMDRELDEVRRKRERG

SEQ ID NO: 23774 - protein, 59 aa, Artificial Sequence
  Synthetic
ERLLRELKRIVDEVKKELDRLDTEHNKAIEDVKRELRKLDEEVRRIVERVKRELDRLEK

SEQ ID NO: 23775 - protein, 60 aa, Artificial Sequence
  Synthetic
SEIEDLIRRIRETLKRVEEDSRRSKEEAKRKLDKVKEDSERLVEKMRRDLEKVKRETDKG

SEQ ID NO: 23776 - protein, 59 aa, Artificial Sequence
  Synthetic
EELLKRLKEVVEDVIRKLDRLDKEHTEIVEEVERRLDKLDKDVERIVEEVKKALDETEK

SEQ ID NO: 23777 - protein, 60 aa, Artificial Sequence
  Synthetic
SEIEKLIEDIRRRLKKLEDESRKSVKDARDMLRRVEERSRDSVRKMREELERVEDESRRG

SEQ ID NO: 23778 - protein, 59 aa, Artificial Sequence
  Synthetic
DELLKRLEDVVRDVKRKLDELDERHTRIVEDVKRRLDDLDREHRKIVEEVKKELDKLLK

SEQ ID NO: 23779 - protein, 60 aa, Artificial Sequence
  Synthetic
SEIEKLIEELRRELEKVKDELERSIEEMDRELDDVRRDSKRLVDEIKRELREVTERTKRG

SEQ ID NO: 23780 - protein, 59 aa, Artificial Sequence
  Synthetic
EELLKRLEEVAEDVKRALEELLKKHTRVVERVEKALDELDKELERIVREAEKELDRREK

SEQ ID NO: 23781 - protein, 60 aa, Artificial Sequence
  Synthetic
SEVEEEEKTAEKILEEVAEEIKESIKRIREEVKKNEDDSERSVREMERRLREVEERIRRG

SEQ ID NO: 23782 - protein, 59 aa, Artificial Sequence
  Synthetic
EELLRRLKRVVERVKERLDRLLEEHTRVVEEAKERHRELDERHEKIVRDVVRELDRRVK

SEQ ID NO: 23783 - protein, 60 aa, Artificial Sequence
  Synthetic
SEVEKVVKELEDELRRVAEDSERSIREMEKRLDDFRKRVRETAEKMKEDLRRVEERARRG

SEQ ID NO: 23784 - protein, 59 aa, Artificial Sequence
  Synthetic
ERILKRVEDIVRRVEEELDKLDEKHTRVVKKVSDALDRIVEELEKIVREVAKRLEDLRK

SEQ ID NO: 23785 - protein, 60 aa, Artificial Sequence
  Synthetic
SEVEKKIEEMRRTLDEARRRSEESKREIKKELDEARKRVEESLKRLRETLKKVEDERRRG

SEQ ID NO: 23786 - protein, 59 aa, Artificial Sequence
  Synthetic
ERLLRRVAKVVEDVKRELDRLDEDHTRAVEEVERALDDLLKKHEDVVREVKTELEKLLK

SEQ ID NO: 23787 - protein, 57 aa, Artificial Sequence
  Synthetic
SELEELIRDIERKLEKVKRDSERSMREIEEDLKRVRKKTEESERRIRDLLDKVRKRK

SEQ ID NO: 23788 - protein, 56 aa, Artificial Sequence
  Synthetic
TEDLRRVAKRVEEELDRSNEEHSKIVDKAKRDLDKSNKEHSKVVEDAERTLDRVED

SEQ ID NO: 23789 - protein, 57 aa, Artificial Sequence
  Synthetic
SELEELEERIERLLEKVRRESEKLLRELEKKLKDVERKIEDSIRKIRDDLRKVRERK

SEQ ID NO: 23790 - protein, 56 aa, Artificial Sequence
  Synthetic
TEDLRRVLDRVKKDLDRSNEEVRREADRIMKELDKLLKKHSDVVKEVLEALDDTDR

SEQ ID NO: 23791 - protein, 60 aa, Artificial Sequence
  Synthetic
SEIEEIKRRLEETNKRVREKNKRSVDRIKEHLERSRRRVEEIIRRIEKLLEELEEKARRT

SEQ ID NO: 23792 - protein, 59 aa, Artificial Sequence
  Synthetic
EKLLRDLEKALRDSIRTLKRSVEENDRINKEANEDSERLLRELKKVLEKAKKDVDELRR

SEQ ID NO: 23793 - protein, 60 aa, Artificial Sequence
  Synthetic
SLEEELRELARRLKEEVRKLEETLEKVLEDSARNIKRLIDDLKRVNDELRKRVDDLIREV

SEQ ID NO: 23794 - protein, 59 aa, Artificial Sequence
  Synthetic
KEALDRVRKKLEDALKKLRDEVREMKKKNDKTNKEVKDKADELRKKHEDTLEELKKRVK

SEQ ID NO: 23795 - protein, 57 aa, Artificial Sequence
  Synthetic
SEVDEIIKRIEDLLKEVRDESKRNEDRIREKLKRLKKKSEDNAEKIKDELKKIRDRK

SEQ ID NO: 23796 - protein, 59 aa, Artificial Sequence
  Synthetic
KEVLDTLRDAIRRVKEELDRNLEKNTELIKRVKETLDDLLRRNKELIRKAEETLDEERR

SEQ ID NO: 23797 - protein, 61 aa, Artificial Sequence
  Synthetic
DELEKIRKELEDLSRENKEKLERIARELKRLSEENTETLEKLKEEIRRLLEKLKRIVEKDG

SEQ ID NO: 23798 - protein, 59 aa, Artificial Sequence
  Synthetic
KEMLDRIKELLDTHRRILEDIKREIDKLLEDHRRRLEELLRDLKRALDRVREEVDRLRR

SEQ ID NO: 23799 - protein, 57 aa, Artificial Sequence
  Synthetic
DDVRRIEEEIRRTLRELRETLKRVERRNREENEDLKDKMRRMKKENEDTNERVKKEG

SEQ ID NO: 23800 - protein, 56 aa, Artificial Sequence
  Synthetic
KERLDKLLEDLAKEARKVIEDLKEILRRTKESIDEVEKTLREILKKSKETADRVET

SEQ ID NO: 23801 - protein, 57 aa, Artificial Sequence
  Synthetic
SDLERLKKRNDDANRKLKETLDRVEKENRDVNRKLEKELKEVEEKNRRENKKVRDRG

SEQ ID NO: 23802 - protein, 56 aa, Artificial Sequence
  Synthetic
KEELDKILTRSEEVARRIIEELKKILEETRKSAERVIRRLEEILKESEREVREVET

SEQ ID NO: 23803 - protein, 57 aa, Artificial Sequence
  Synthetic
SEVEETIKRVRDTLKKHNEESEKAIRELEEELKRLDDKNREAVEDVKRTLDELRRTK

SEQ ID NO: 23804 - protein, 59 aa, Artificial Sequence
  Synthetic
KDLRKRLEELLREVEEDLKRNIEKLDKALKEAKEVIERSIEHLRRVLEEVERVLRELAR

SEQ ID NO: 23805 - protein, 60 aa, Artificial Sequence
  Synthetic
RKEDEMRKLLDEIEKDLKRNDERVRRVLKRSKENLRRLEERAEKLLETVEREIKRLEEEG

SEQ ID NO: 23806 - protein, 59 aa, Artificial Sequence
  Synthetic
EREVKRTIDELKDELRKHNDKTEKLIRRARETDKELNDRVAKREEEARRELEEVDRRVR

SEQ ID NO: 23807 - protein, 60 aa, Artificial Sequence
  Synthetic
SLEEAVEKLLRDSEENLKKNEEDVRRLLKKSKENADRLRDEVRKLLETAEREIKRLEDEG

SEQ ID NO: 23808 - protein, 59 aa, Artificial Sequence
  Synthetic
ERLIRETEKDVKRRDEEHNTRTEREIREAKKEDEKLNKEVRDTEKRLRDELRRVEERVR

SEQ ID NO: 23809 - protein, 60 aa, Artificial Sequence
  Synthetic
SKEDKVRELLRRSKENLDRVREEVRKLLKKSRDTLEELRERAKRLLEEVEEVIKRLEEEG

SEQ ID NO: 23810 - protein, 59 aa, Artificial Sequence
  Synthetic
EKEIEETIRRVEDMDRRLNERLRKKIEDAERMDEALRERVERLIRRVRKELEDVERRVR

SEQ ID NO: 23811 - protein, 56 aa, Artificial Sequence
  Synthetic
SELEEVARRIEKMIRDLEKDLRELERKVRESDERLKRDLERNEKEHRDTIEAMRRR

SEQ ID NO: 23812 - protein, 59 aa, Artificial Sequence
  Synthetic
KDVRDALKKLLDELKKAVEDVRREIERLIREHKRVTEEVERADKELNDRTRKAADELRR

SEQ ID NO: 23813 - protein, 57 aa, Artificial Sequence
  Synthetic
EEVERLEEEVRRRKKEWEDRLEEVKRRNEKAKRESERENEKIAREVREVVKELRERG

SEQ ID NO: 23814 - protein, 56 aa, Artificial Sequence
  Synthetic
KRRLEELLRDHSRMIRRVEAELDKSLEDHKRALDENEKRIDEWLERLRKIVEEVEK

SEQ ID NO: 23815 - protein, 56 aa, Artificial Sequence
  Synthetic
SKIEEIERRVRELEETWRRKLEEVEKDSRRSVKKMEEDLERAARETEEIKRRLREE

SEQ ID NO: 23816 - protein, 56 aa, Artificial Sequence
  Synthetic
ERKLEELLRKHNEVIKRVKEELKRLDKEHTDIVEEVKKELDKLDEDLKRVADEKRK

SEQ ID NO: 23817 - protein, 57 aa, Artificial Sequence
  Synthetic
DEDEDLERLLRKLKRVLDEIRKRIRENIEENREVVERAAREVKKSIDENRKVVDDVQ

SEQ ID NO: 23818 - protein, 56 aa, Artificial Sequence
  Synthetic
GEEVRKKIEDLERELRRTLEEIHKENEKSKRKIEKALRDIREENKKHIREIEETKR

SEQ ID NO: 23819 - protein, 60 aa, Artificial Sequence
  Synthetic
SDIETLTRDVERSIKELEDHLKKHHEEVKERIRRLEEHADELRRRAEKLKEELKRMKDRG

SEQ ID NO: 23820 - protein, 58 aa, Artificial Sequence
  Synthetic
KVEEDVKRLVKKLDEVNERHRREIERNRKELEDVSRRHKEKVDRILEDIKEALDRVRK

SEQ ID NO: 23821 - protein, 57 aa, Artificial Sequence
  Synthetic
SESETVKKENEDHIRKLEDDLRKLEEDNKRHVDDIERRLRDLKRENERFAEEVKKRG

SEQ ID NO: 23822 - protein, 59 aa, Artificial Sequence
  Synthetic
EEVKKTLETLVRTNRRAIREVERRLKESLDHNREVLKRAEEDLRRSIRHLREVVREADR

SEQ ID NO: 23823 - protein, 60 aa, Artificial Sequence
  Synthetic
SIEDELRELKERLERVVEELRRLHEKTIEDLKRVVEKSEKTLRDIRRELERVVEEVRRRR

SEQ ID NO: 23824 - protein, 59 aa, Artificial Sequence
  Synthetic
KEVLDRLRKKVEDTIRKMKDEAKKLDDEHKKAVRRLEERNEETARRVRKAVEDIERETK

SEQ ID NO: 23825 - protein, 60 aa, Artificial Sequence
  Synthetic
SIEDILRKLTKDLEDVIRRSRKTSEDLKEELKRVLDKHKEKLDRILEDVERVVREVEERR

SEQ ID NO: 23826 - protein, 59 aa, Artificial Sequence
  Synthetic
KEILDRLEEEVRRLIEELDKENDEARKEHREVAKRNEEEIKKLEEEAKDSIRRLREESR

SEQ ID NO: 23827 - protein, 57 aa, Artificial Sequence
  Synthetic
RESEELDKRLKEIAKDIRDKLDEIRRENEKTAKEIEDTIREIERDNERIDREMERRG

SEQ ID NO: 23828 - protein, 59 aa, Artificial Sequence
  Synthetic
KRFKDVIRRLEEELKKLLKRAEEEIRDSKRHLRELLKKVEKVIRESKANLDRTLKKLRD

SEQ ID NO: 23829 - protein, 60 aa, Artificial Sequence
  Synthetic
SEEEDLRRKVEELEERVERYKEELKKEIERIETENKRHVEELERRLRKIAREVDDAKRRQ

SEQ ID NO: 23830 - protein, 59 aa, Artificial Sequence
  Synthetic
EDLDRLLDEMRREAERLLDELRKVTERIAREVKRSNEENKKVLDEIRKAIKDLLDKLRK

SEQ ID NO: 23831 - protein, 59 aa, Artificial Sequence
  Synthetic
STEEKVEEDLRRLEEKNRRHVREIEERLERMKEENRDHVRKLEEKLRRLDEEVRKVKEG

SEQ ID NO: 23832 - protein, 56 aa, Artificial Sequence
  Synthetic
RETLKRAERKLRESLRHNREVLERARRELKKSLDHNDKALEDAERRIREIREELEK

SEQ ID NO: 23833 - protein, 59 aa, Artificial Sequence
  Synthetic
DLKEVLDKLRELVREVTERIKRTIEEIERLLRKVEREMRETIRTDEELLKTVVDELRRK

SEQ ID NO: 23834 - protein, 59 aa, Artificial Sequence
  Synthetic
RRKIKKVLDDLRKIIEDIERESRESLERLREIIERLKRRSDKTLKDSKKVIDDIRRRTK

SEQ ID NO: 23835 - protein, 59 aa, Artificial Sequence
  Synthetic
DLEEVLEDLRRLMEEVKRRIERTIEEDKRLLDEVERRIRETIRRDRELLKEAERDLREK

SEQ ID NO: 23836 - protein, 59 aa, Artificial Sequence
  Synthetic
RDKIRKVRKELREIIDRIRRESERSLEESRRVIEKIDEKSKRTLEESRRVIEEIKEKAR

SEQ ID NO: 23837 - protein, 56 aa, Artificial Sequence
  Synthetic
SSEEMLRTVEELIKEARKRLDESLEEVRKRIEDAKRRHEESNDENRRLVEDAKRRV

SEQ ID NO: 23838 - protein, 55 aa, Artificial Sequence
  Synthetic
KDVLEELREIIDRLRRESEDSLRRLEKIIKDSEDRSRESSEELKEIIKRLLEEDK

SEQ ID NO: 23839 - protein, 56 aa, Artificial Sequence
  Synthetic
SKDEVLEEVERRIRTAERDLERMVRRNEELIRDAKREHERSNRENERLVTEAKREI

SEQ ID NO: 23840 - protein, 55 aa, Artificial Sequence
  Synthetic
KDVLDELRDIIRRLREELKKSSDDLERIIRRSVKESRDSSEELRKIIEDLKREAT

SEQ ID NO: 23841 - protein, 56 aa, Artificial Sequence
  Synthetic
SEKEVLDEVKELIERAKERLRRMLERNERLVRDAERKLKRLLDEDRESIERVKKRL

SEQ ID NO: 23842 - protein, 55 aa, Artificial Sequence
  Synthetic
ERVLEELKKEIRRLEEEVKKSSEELERIIEKLLEELKRSLEESEDIIRRLEEETR

SEQ ID NO: 23843 - protein, 56 aa, Artificial Sequence
  Synthetic
RKDELLRRVEEEIKKVKKRLKEMLDTDRKLIEDAERKLEEAERRDSDLIRRAKERV

SEQ ID NO: 23844 - protein, 55 aa, Artificial Sequence
  Synthetic
DRVLEELERIIEELKREIEKSLRETEKIIKELEDELRKSLEETERIIRKLEEESK

SEQ ID NO: 23845 - protein, 56 aa, Artificial Sequence
  Synthetic
RSEEVLREVEKAIRRAKEELKRAVETDRRRNTEAARALEEILDTDRRLIEEAKRRL

SEQ ID NO: 23846 - protein, 55 aa, Artificial Sequence
  Synthetic
EKVLRDLKKIIDDLRRRIEESLRDSERIIEKLRRDLEASLEESRRIIERLKEKAD

SEQ ID NO: 23847 - protein, 56 aa, Artificial Sequence
  Synthetic
REKELLDKVKELVERAKRELERLVREDDKLNEDLKRRLTKILKEDSDRIKEVKERL

SEQ ID NO: 23848 - protein, 55 aa, Artificial Sequence
  Synthetic
DKVLEDLRKIIEDLLREIEESLRESREIIKKLEKRAKDSLKETEEIIEELERRDT

SEQ ID NO: 23849 - protein, 60 aa, Artificial Sequence
  Synthetic
SEVEELLDRVKKVADESRREAKRLLDESKRVIDKSLDEVRRLLKESREVIEEVKKRVDEK

SEQ ID NO: 23850 - protein, 56 aa, Artificial Sequence
  Synthetic
DEVLKRLEDLLRKVAEEHRRITREDEELLKRAEEEHERFSKEDEDLLRKAEKEVED

SEQ ID NO: 23851 - protein, 60 aa, Artificial Sequence
  Synthetic
SRVDELVKRVRDVAREVKRINDELLKRVEEVIKESRDRVRELLKKVEDVIRRAAEEIDRI

SEQ ID NO: 23852 - protein, 56 aa, Artificial Sequence
  Synthetic
KEVVREIEKLLEDVRRTSEDTVRKIRELVAEVDDDHRRASETIRRLLKEAEDRARK

SEQ ID NO: 23853 - protein, 60 aa, Artificial Sequence
  Synthetic
SEVEELLKDVERVIKRSEDEVRRLEREVEKSSEDVERINRKLLRDSREVIKKVIEDVRRV

SEQ ID NO: 23854 - protein, 56 aa, Artificial Sequence
  Synthetic
KEVLDRIRELLETARRRHKEATKKIKRILEESEKKSRRSIEEDKRLLDEAKEEVRR

SEQ ID NO: 23855 - protein, 57 aa, Artificial Sequence
  Synthetic
SVEEVVRDNERRLEEDAERTRRVARRIEKLLDELRKKVEDVIREAKERLERLLEEIG

SEQ ID NO: 23856 - protein, 60 aa, Artificial Sequence
  Synthetic
AEDLLREVNKRNEEVIRRNKELLDEVEKRIREVIKRLEELLEKVKRELERVADELRKAKK

SEQ ID NO: 23857 - protein, 57 aa, Artificial Sequence
  Synthetic
DVERVLKENKETLDEDRKRTKEVIDRNKKKLEDLAREVRKVIEEIKKRLKELLDKTG

SEQ ID NO: 23858 - protein, 62 aa, Artificial Sequence
  Synthetic
EEAEELLRRVNKDNEKVVRENEKLLKEVLDDSERVIKELRDLLEEVRRRIEKVIRDLEERRR

SEQ ID NO: 23859 - protein, 59 aa, Artificial Sequence
  Synthetic
STDEFIERLKKILRENEEKVKEVLKRNEDLLKEDEDRTRKAIKELEDKLRRVKERVERQ

SEQ ID NO: 23860 - protein, 56 aa, Artificial Sequence
  Synthetic
VKEIEKELRRVSEESERELRKHDENTKRVSEENKERIDRLRKTLDEVIERAEERAK

SEQ ID NO: 23861 - protein, 60 aa, Artificial Sequence
  Synthetic
SLDEVIRRLEETLRKDEEDTRDVIRKVRRILEENRKEVKRVIDELRRRLEEVKKRVEDSK

SEQ ID NO: 23862 - protein, 56 aa, Artificial Sequence
  Synthetic
ADTIREELRKVLEDNKRILRRLLEELKRVSEESRDRLRRLKEELERVIEEVERRAK

SEQ ID NO: 23863 - protein, 60 aa, Artificial Sequence
  Synthetic
SIARKVLTDLRKIVEDLERDVERSDRDSERVVREVLERNEEVLKRLRDIVEEIKKVIREV

SEQ ID NO: 23864 - protein, 59 aa, Artificial Sequence
  Synthetic
RDDVERIKRDLERILKEVARKATESVKRNERILEEVKRHAEKSTEDVERLLRELEDTVR

SEQ ID NO: 23865 - protein, 60 aa, Artificial Sequence
  Synthetic
DEIEDALREARRVTEEVRREIEKSDKESEDVVREVLRRNEEVLRRLREIVKEILDELRKR

SEQ ID NO: 23866 - protein, 59 aa, Artificial Sequence
  Synthetic
EKRVREVLRDLERLHEESKRTVERSVERNKTILKEVRKHAETSKRELERILEDVKRATK

SEQ ID NO: 23867 - protein, 60 aa, Artificial Sequence
  Synthetic
SEIDKVKKDLEKITRDVERAIKKSDDDSRKNSKEVLETNERVLEELRRIVKEVLDEIRRV

SEQ ID NO: 23868 - protein, 59 aa, Artificial Sequence
  Synthetic
RDRARDVDKKIKDLHKKSEDEVRKSVKRNRDLLEESKRHAEESREDIRRLLDEVREEAK

SEQ ID NO: 23869 - protein, 60 aa, Artificial Sequence
  Synthetic
SSAETVLTELRKIVRDILEKSKKSNDDLRKIVEEILKDNEDVLRELREILRRIKEKIDER

SEQ ID NO: 23870 - protein, 59 aa, Artificial Sequence
  Synthetic
KEKVDRIRDDIRRLLKKLRDDVERSVRDVRRILKEVKEHAERSEEEVKRLLKELRDRAK

SEQ ID NO: 23871 - protein, 60 aa, Artificial Sequence
  Synthetic
DEMDKVLKDAEDVTRRVKEELRKVDEESRRVVKRILDENRRVLKELEDRVRDLRRLIREI

SEQ ID NO: 23872 - protein, 59 aa, Artificial Sequence
  Synthetic
EEDVRKIKEDLERLHRESKRDVERSARDNERILEEVKRHADESRREVKRLLDEAKEEVD

SEQ ID NO: 23873 - protein, 60 aa, Artificial Sequence
  Synthetic
DDLERVLRELERLVDEIRKEIEKVDRESEELDRRVKETIKELDERSKRLVEEVEDMIRRN

SEQ ID NO: 23874 - protein, 55 aa, Artificial Sequence
  Synthetic
EEVVRRVEKIVRELRKTVEDSIRRNEKSVEETRREAEKSEKRNRELVKRLEEKAK

SEQ ID NO: 23875 - protein, 60 aa, Artificial Sequence
  Synthetic
SEAEKVLKELEDLVRRIEEDIRRTNEEVRKLDEDVLEDIKRVDEESKKLVREIEERIRSR

SEQ ID NO: 23876 - protein, 54 aa, Artificial Sequence
  Synthetic
EFVRRLEELVKRLADKVKESVDTSRTSVKRTEDEARKSVRRNEDLVRRLEEDAK

SEQ ID NO: 23877 - protein, 60 aa, Artificial Sequence
  Synthetic
SELEKVLEELERLVKRIEEEIKRTNKEVRDLDEEIRKAIERSNRETERLAREVLERIREE

SEQ ID NO: 23878 - protein, 55 aa, Artificial Sequence
  Synthetic
EEVVRRLEDLVRRLEESVERSVRTSRKSVKETEDRIREVERHDERLVEELERAAK

SEQ ID NO: 23879 - protein, 60 aa, Artificial Sequence
  Synthetic
SDLEDVLRKVEDLDRKIAEDIRRTNEDVKRLDEEIEEKIRRSNEKLRELVRRVLKAIRDR

SEQ ID NO: 23880 - protein, 55 aa, Artificial Sequence
  Synthetic
EEVVRRLEESVRRTKERIDRSLKTSRDSVRETERKIKESKDTSEKLVKDLRDAAK

SEQ ID NO: 23881 - protein, 61 aa, Artificial Sequence
  Synthetic
SEVDDILRRLREIDEKLLRENEESLKRLKDEVDRLKRKNEKSLDDLRKLVEKLIDDLRKRK

SEQ ID NO: 23882 - protein, 55 aa, Artificial Sequence
  Synthetic
EKVLEEVKRSVDRTRDHLRKSEEDVRRLLDELRRHLEDSERRVRELLRKLREKVR

SEQ ID NO: 23883 - protein, 61 aa, Artificial Sequence
  Synthetic
SKVDEILRELKRLVDELLRRIEKTLKELEDLVRELLKENTRSLEELRELVERLLEELRRRK

SEQ ID NO: 23884 - protein, 55 aa, Artificial Sequence
  Synthetic
REFVERVRELLKRLEDELRKSNRTIEKLLRDLARHLEDSIRRVEELLRELEEKAT

SEQ ID NO: 23885 - protein, 60 aa, Artificial Sequence
  Synthetic
KEVEDILRELEKIAKDLRDEIRESDDESRRLVEELLKRSEDTLKELRDLVKKLLDRLRER

SEQ ID NO: 23886 - protein, 55 aa, Artificial Sequence
  Synthetic
EEVVKRVEELIRRVEEEVRRSTRRNEKLLEDLRRELERSDRELEKLMDDLRRKLK

SEQ ID NO: 23887 - protein, 60 aa, Artificial Sequence
  Synthetic
DDVEKILEDLKRIDTELTKRTRDSNKELEDEVRRLMERSRRTLKELEDEVRKLLDRLRKR

SEQ ID NO: 23888 - protein, 55 aa, Artificial Sequence
  Synthetic
RKVLEDVRRSLERTERELRESDKSVKKLLDELKEELDRSDREVERLLEELRDAVR

SEQ ID NO: 23889 - protein, 60 aa, Artificial Sequence
  Synthetic
SEVDEILRKLRELVKELIRRTEESNEKLRKLVEDLRDESRKSLEELRELVERLADELRKR

SEQ ID NO: 23890 - protein, 55 aa, Artificial Sequence
  Synthetic
ERVVREVEELLKELKRRLEESDKSVAELLRRLEKDLRESDRRVEELLKRLEDEVK

SEQ ID NO: 23891 - protein, 60 aa, Artificial Sequence
  Synthetic
SEAEKILTELEEIDRRLVKRTEDSNRKLRDTVRKLEEESKKSLEELRELVDRLLKRLDER

SEQ ID NO: 23892 - protein, 55 aa, Artificial Sequence
  Synthetic
REILERVRESLERTDKRLRESDESVKKLLEDLKRKLEESDRRAERLLEELRKRAT

SEQ ID NO: 23893 - protein, 58 aa, Artificial Sequence
  Synthetic
SELEEVLKRVEETVRRLTKRLEESLEETRRIVDKLREDLRRSLERTERIVRELTEKLG

SEQ ID NO: 23894 - protein, 59 aa, Artificial Sequence
  Synthetic
EEELREVEKKAEKLVRELEERLKRVIEDSERLVTDLKEKLERVLETSKKLLADLEERAR

SEQ ID NO: 23895 - protein, 57 aa, Artificial Sequence
  Synthetic
KELDEVLEKVKRIVDELERKLERSLRETKRIVDELREELKKSLKETEDIVRELERDL

SEQ ID NO: 23896 - protein, 59 aa, Artificial Sequence
  Synthetic
DERLTEVEERAKRLVDTLAEKLKEVERRSEELVKTLEEELRRVLDTSRRLVEELREKAR

SEQ ID NO: 23897 - protein, 58 aa, Artificial Sequence
  Synthetic
SELEEVLKEVEEIVRRLEEELRKSLKETREIVTKLLKKLKESLEDSERIVRELSRKLG

SEQ ID NO: 23898 - protein, 59 aa, Artificial Sequence
  Synthetic
DEEARKVLETAKKLVDDLKRKLERVKEESAKLVDELRKELRRVNERSKELVEKLEREAK

SEQ ID NO: 23899 - protein, 57 aa, Artificial Sequence
  Synthetic
SELEKVLREVEEEVRRLKKKLKESLDRTKEIVDRLKKDLKRSLDETKKIVDELREKL

SEQ ID NO: 23900 - protein, 59 aa, Artificial Sequence
  Synthetic
DKDLKDVERKAEKLVEDLDRELKEVEKTSRKLVKELEAELREVDKTSKKLVDDLRKDAK

SEQ ID NO: 23901 - protein, 61 aa, Artificial Sequence
  Synthetic
REVEELLKEVEESTRTSKKIIEDLLRRVKESSDKSKKDIRRLLEEVRRIVDTVRKILERRG

SEQ ID NO: 23902 - protein, 62 aa, Artificial Sequence
  Synthetic
EELEKRVREVEETLKRLVDENRETLERVARKAKRLVEDDKRDLEEVVRELEELLKRLKEELD

SEQ ID NO: 23903 - protein, 61 aa, Artificial Sequence
  Synthetic
SSVDRLLERVKRTTDESKERVERLLERVKESSERSEREIKRLLEEVERIVREVKKEVERRG

SEQ ID NO: 23904 - protein, 62 aa, Artificial Sequence
  Synthetic
EEVEKRVREVERTVEELVKEDREAVKRVEETIRRLLKKNEDTVKKVEDDLRKLLEDLKRDVK

SEQ ID NO: 23905 - protein, 60 aa, Artificial Sequence
  Synthetic
SEIEELLRRVKKVNDESRERIKELDKRSREVNERSRRKNEELLKRVEEVVREVEERIDRT

SEQ ID NO: 23906 - protein, 62 aa, Artificial Sequence
  Synthetic
KELEDRVRDAVRRLERSLKENEDRVRESIERNKDSVRRNEEHVDESIKRLEKEVDRVRKRAE

SEQ ID NO: 23907 - protein, 60 aa, Artificial Sequence
  Synthetic
SEIEKLLEDVRKVAEEVKRAIDRLNEENKRVNEKSKERIDRLLEEVRKVVEEVLRRVKTS

SEQ ID NO: 23908 - protein, 62 aa, Artificial Sequence
  Synthetic
EEVEKRVRRVVEKLREIVKEVEEKVRRALDENRRSLEENRRRVKRVIEELEKILKEVEDEVR

SEQ ID NO: 23909 - protein, 57 aa, Artificial Sequence
  Synthetic
DEVEEMEKELKKLLDDSKRRSDELIEEMRKLNEESKKRSRELEKRLRDINKEIRDRL

SEQ ID NO: 23910 - protein, 59 aa, Artificial Sequence
  Synthetic
SKLLDDLRKTIEKVIRESRELLEELRKENERVIEESEKLLRDLLRENEKVAEEVRRTAT

SEQ ID NO: 23911 - protein, 57 aa, Artificial Sequence
  Synthetic
SEVEELIRRLEKLLREVEKRARRLIEEAKRLNDESNKESRRLIEELERLVEDVAREA

SEQ ID NO: 23912 - protein, 59 aa, Artificial Sequence
  Synthetic
EKLLRDLERAIRDVVRKLEELLRRLREENERVIKESEELLERVRKEIEDVLREAREAAR

SEQ ID NO: 23913 - protein, 57 aa, Artificial Sequence
  Synthetic
SKVEKLITELEKLLKDSNKKTEDVERELERLNKKSNDDSRRIIEEHKKIVEEIARRV

SEQ ID NO: 23914 - protein, 59 aa, Artificial Sequence
  Synthetic
EELLKRLKDRIKKVVEESEKLLRDLVKENREVIKESEEILRRLAENLKRVKEEVDRRTT

SEQ ID NO: 23915 - protein, 57 aa, Artificial Sequence
  Synthetic
EEVERLIKELDDLLRRSNARTRDLIRKADEELRRSNEESRRIVERMEEINKRIADEV

SEQ ID NO: 23916 - protein, 59 aa, Artificial Sequence
  Synthetic
KKLLDDLKRKIETVIKESEDILRKLEEDLKRVIEESKELLDRLLEENKRVMEEARRRTK

SEQ ID NO: 23917 - protein, 57 aa, Artificial Sequence
  Synthetic
DEVEEIKKEAKRIVEDLKRRNEELKRRLERLVEEVKKRNEESKKRLEDIVRKIKEDI

SEQ ID NO: 23918 - protein, 56 aa, Artificial Sequence
  Synthetic
LKEVRKTLEKARKENEDVIRKIEEDAKEVLRRDEESNRDINRKVDEVRKRVEERRK

SEQ ID NO: 23919 - protein, 57 aa, Artificial Sequence
  Synthetic
REVEEVKKDLERIVEEVKKRNEELKRRLEELLKENKRRNEKSDEDLKRIVDRIDERV

SEQ ID NO: 23920 - protein, 56 aa, Artificial Sequence
  Synthetic
LKDVKRVVEKVRRENEKVLREILTDAEKVSRDDETSNRDLNRKLEEARERVERKAK

SEQ ID NO: 23921 - protein, 57 aa, Artificial Sequence
  Synthetic
SEVEEIKERLKRLVEEVERRNRKVIRESEETVKENEKENRKSKKRLKEILDEIVERI

SEQ ID NO: 23922 - protein, 56 aa, Artificial Sequence
  Synthetic
LKDVKRDVERVLKENKEVLDRLRKEDEEVSRRDKKSNEDINRVVEDVKRKLEEKAK

SEQ ID NO: 23923 - protein, 57 aa, Artificial Sequence
  Synthetic
SEVEKVKEDLKKLVKEVEDRNRESKRRSEETVKENTKKNEDSKRRLKEIVDRIREEV

SEQ ID NO: 23924 - protein, 56 aa, Artificial Sequence
  Synthetic
LKDVRREVKRVLDEDKDTNDKLNDRDRKASEEDERSNRELNKTIARAEEEVKEARR

SEQ ID NO: 23925 - protein, 57 aa, Artificial Sequence
  Synthetic
KEVEDVKEKLKELVERNRDENRKTKEELRRLVEKNRKENEESKKRLKEIVEEIRERV

SEQ ID NO: 23926 - protein, 56 aa, Artificial Sequence
  Synthetic
LREVEKTAEKVSKEDKETNDRIRKDLKKVSDEDKRSNEEVNKRVDKVRKEIEEERK

SEQ ID NO: 23927 - protein, 57 aa, Artificial Sequence
  Synthetic
EESERLDELIKEVVERVKKLNEEARELIKDVLRRNEEVNTRLEELNRKVEKEVREEK

SEQ ID NO: 23928 - protein, 55 aa, Artificial Sequence
  Synthetic
RKVLEKIRRALEKVHEDNRRSIRDVERMLEKVEDDNRKTIERSRRLVKRVEEELR

SEQ ID NO: 23929 - protein, 60 aa, Artificial Sequence
  Synthetic
RSLEELKKEVERVARAVRKVSEDNKRLLDRVREEVKRVSKENRDLVREVERRVEEVKRRV

SEQ ID NO: 23930 - protein, 58 aa, Artificial Sequence
  Synthetic
ERVDRLKEEIEEILRDLERKVRENKERSKKIAEDLRKHAEDNAREVKKALRDLEEKVR

SEQ ID NO: 23931 - protein, 60 aa, Artificial Sequence
  Synthetic
SELERVLREIREVSRETRERSERSLEEIRRVVEDVRRKNKESLDRNREVLEEIRKALEKG

SEQ ID NO: 23932 - protein, 59 aa, Artificial Sequence
  Synthetic
EDRVERVKRELERLVEENERIVRESRKTLEKLVRDVDRTSKRVKDENRKLLRRVEEEAR

SEQ ID NO: 23933 - protein, 60 aa, Artificial Sequence
  Synthetic
SEVEDLLRRIRKVVEEVERRSRDSLRRNEEVVKEVEERSEKSLRDDKKVIDDVKRRLREG

SEQ ID NO: 23934 - protein, 59 aa, Artificial Sequence
  Synthetic
KDEVRKAEEELRKLVRKAEEVVKKSKEDLERTTRKVEKVVRKSEEDSRRLLREVAEEAR

SEQ ID NO: 23935 - protein, 60 aa, Artificial Sequence
  Synthetic
SKLDKILEELRRIVEEVKRRSEESLEEIERVVEEVKRRSRRSNEELKRIVDKIKKDLRDG

SEQ ID NO: 23936 - protein, 59 aa, Artificial Sequence
  Synthetic
EDDVDRVRREADKIVEDVRRVVERSKRRLDELRRDAEKVVRDSERRIDRIVDDVRRTAK

SEQ ID NO: 23937 - protein, 60 aa, Artificial Sequence
  Synthetic
SDLEEVLKKLEDILRKIKETNDKALREIEEVLRRVKERSRRSNKEAEKVLREVEKMLEKG

SEQ ID NO: 23938 - protein, 59 aa, Artificial Sequence
  Synthetic
EDEVRRIKERLERLLRTAERVSREIKKRLEELVDDVRREVKRSKDRLKRLVDEVAERVR

SEQ ID NO: 23939 - protein, 60 aa, Artificial Sequence
  Synthetic
SKVDEILKDIERVVREVEKKSRKSNEELKRISEESKRRNEDALRRLKEIADRVRERLDKG

SEQ ID NO: 23940 - protein, 59 aa, Artificial Sequence
  Synthetic
EDKVRDARRRLKELVDRVKRVVEESEKRIRKLVKENRDVSRRIEEELKRIVREIEEEAK

SEQ ID NO: 23941 - protein, 60 aa, Artificial Sequence
  Synthetic
SKLEEILKKVEKVSEDTKRKSEDSNRRIKKVSDESKELNKKALRDITEMAKEVDRVLKEG

SEQ ID NO: 23942 - protein, 59 aa, Artificial Sequence
  Synthetic
EDRVDEARRRLERLVEDNARVVKRSEDELRKLVEDNRRVSEEIERKLKELLKRVAESVT

SEQ ID NO: 23943 - protein, 60 aa, Artificial Sequence
  Synthetic
SKAEEALKELERVADEARRASEKSNREAKKAADDAKRASEKSLREAERAAREAEKALREG

SEQ ID NO: 23944 - protein, 59 aa, Artificial Sequence
  Synthetic
KDDAKRIKDEADKIVKRAEDAARESKKRLKRLVEDAERAAKESKEELDRLVREAEEKAR

SEQ ID NO: 23945 - protein, 60 aa, Artificial Sequence
  Synthetic
SEVERVLKELEDLIRKLEEEIERSLRELEKLIEELKKEIKESLDELEKLIRDLIRRLDER

SEQ ID NO: 23946 - protein, 56 aa, Artificial Sequence
  Synthetic
SEEADKRAKELLDKLRKVIEKSKEDSRKILKDLERTVKRSEEESRKVLEKLERRVQ

SEQ ID NO: 23947 - protein, 60 aa, Artificial Sequence
  Synthetic
DEVERVLRELRELIKRLEEEIRKSLKELEDLIRRLIEEIEETLKKVEKIIRELKARLEER

SEQ ID NO: 23948 - protein, 54 aa, Artificial Sequence
  Synthetic
ELREEAKKLLRRLEKTVEKSKRDSEKVLRDLEEVVRESERASKELLKDLKRKVD

SEQ ID NO: 23949 - protein, 61 aa, Artificial Sequence
  Synthetic
SELERLLREVEKSSRESVETSRKLNEEVEKTTRESKRRIEELLRRVEKIVDEVKKVIDRDG

SEQ ID NO: 23950 - protein, 62 aa, Artificial Sequence
  Synthetic
DEARERLRRVAEEIKRLAKENKRVAEESKRRAKELLDDNKDTVRRVSERLKELLEDLDRKLK

SEQ ID NO: 23951 - protein, 61 aa, Artificial Sequence
  Synthetic
DEIEDLLRRVRKTTEESKKRSEDLNKEVKDSTREVKKRIKELLEEVERRVKEVKERMERDG

SEQ ID NO: 23952 - protein, 62 aa, Artificial Sequence
  Synthetic
EEAEKRVRRAKEEAERLIRDNERKLKESEEELRRLIKETEDVLRKAEEDIRRILADLRRRLK

SEQ ID NO: 23953 - protein, 61 aa, Artificial Sequence
  Synthetic
SEVEKLLEDVRESTKRVKELSKRLNEEVERTTKESEDRTRRLLEEVKRIVEDVKDKLRKRG

SEQ ID NO: 23954 - protein, 62 aa, Artificial Sequence
  Synthetic
EEAKKRVKEISDEIRKLAEETREVLERSEKRLRELIRRNEKVNKEVAERLEEILRDLDRKLR

SEQ ID NO: 23955 - protein, 56 aa, Artificial Sequence
  Synthetic
REKEDAKRRLEEILREVKKDLDRVHRENEKLVEDTARTVERIKRELKKLLDRAREV

SEQ ID NO: 23956 - protein, 56 aa, Artificial Sequence
  Synthetic
IEELRKRVEDVVRRVKEELERLLKENEDSTREVKKEAERLLDEIRKVLEKVERDAK

SEQ ID NO: 23957 - protein, 56 aa, Artificial Sequence
  Synthetic
REKEEAEDRMRRILEEVRRTLEEVHKENRRLLEDTRRTVERIERENRKIVEEVRRV

SEQ ID NO: 23958 - protein, 56 aa, Artificial Sequence
  Synthetic
IETLERRVREVVERVKKELERLLRENKKSTEEVKRTAEDLLRKNREVVEEVKKAAK

SEQ ID NO: 23959 - protein, 61 aa, Artificial Sequence
  Synthetic
DEVEELERRLEELLKKSRDEVTKLADELDRVLERSREVVKKDRESLKEILKEVERLVREKN

SEQ ID NO: 23960 - protein, 59 aa, Artificial Sequence
  Synthetic
KELLDRLEKELRESVKRSEERLKELADRIRKSLEDSERLSRRTNERIKRVLEEVTERVK

SEQ ID NO: 23961 - protein, 61 aa, Artificial Sequence
  Synthetic
DEVEDVSRKLDEALERSRRITEDLEKKLREVIETSKREVDKLAERLDEVIREIEERIRKKN

SEQ ID NO: 23962 - protein, 59 aa, Artificial Sequence
  Synthetic
KELIEKLEEDIRRVLEKIKREHERLLRKIEESLKDSKRRLDKLRRDIERILERIREALR

SEQ ID NO: 23963 - protein, 60 aa, Artificial Sequence
  Synthetic
REIEEALRELEEVLRKVKEDNKRLEEEIRRVLEEVKRINEKLLRDAKKELDRVKEILKDT

SEQ ID NO: 23964 - protein, 55 aa, Artificial Sequence
  Synthetic
EEAKKELRRLVKEVEDVVRTSTRRLEELVKEVRRVSEETKRALDELVKEVREEVR

SEQ ID NO: 23965 - protein, 60 aa, Artificial Sequence
  Synthetic
DEIEDVERKIKEVVDRVRDINRRLRDTIRRVLEKVTRINEELRDTVRKVLKEVERILREI

SEQ ID NO: 23966 - protein, 55 aa, Artificial Sequence
  Synthetic
EEIKEKLERLVREVKRISEESAKDLERLVREVEKVVEDSERELRRLVEEVERRRK

SEQ ID NO: 23967 - protein, 60 aa, Artificial Sequence
  Synthetic
SEIEKVRKEIDEVLKRVRKINEDLLRELEEVSKRSKDINDDDLRTNTEVLKEARRILKDS

SEQ ID NO: 23968 - protein, 55 aa, Artificial Sequence
  Synthetic
KDVTKELDELVREVEEEVRRSKDTLRRIVEENREVVERSERKLKKSSDDVREERR

SEQ ID NO: 23969 - protein, 60 aa, Artificial Sequence
  Synthetic
SELEKVLRELEENSRRNEEELRRSNDKVRRVLDEIRRKLEEVLRKVEEVLRRIEEELSDK

SEQ ID NO: 23970 - protein, 60 aa, Artificial Sequence
  Synthetic
VKDKVKKAEDDVRRLLERNRRLVEESKKSSEEFLRRVEKLVDDARKKVEDALRKVRETAR

SEQ ID NO: 23971 - protein, 60 aa, Artificial Sequence
  Synthetic
SELEKVLRDLEKNSRENEELLRRSNKKLKDVVDKIKKKLERALEELREVLEKIRRELSRS

SEQ ID NO: 23972 - protein, 60 aa, Artificial Sequence
  Synthetic
MDDKVRKAEEDVKRILDENRDLVRRSEENSKRLLERVRELVERVKDAADKLLREVREEAR

SEQ ID NO: 23973 - protein, 60 aa, Artificial Sequence
  Synthetic
SELETVLRELEENSRRNEELLRRSLDRVRRVLEDVTKKLREVLEEVRTVLEDVKRKLSRV

SEQ ID NO: 23974 - protein, 60 aa, Artificial Sequence
  Synthetic
VRDKVKEAKDRVRKILEDNRRLVEKSEEDSKRILETLRKLVEEMKRELERIETELREAAR

SEQ ID NO: 23975 - protein, 60 aa, Artificial Sequence
  Synthetic
SELETVLRKLEENSRRNKKLLRDVLEEDKTVLRDVERKLREVLDELRKVLEDIRDKLSRK

SEQ ID NO: 23976 - protein, 60 aa, Artificial Sequence
  Synthetic
VKDKAETMKKAVEEILDRNRKLVTEAEKRSEDSLRKLRKSVKEVEEKVKRVLEEVKKEAD

SEQ ID NO: 23977 - protein, 60 aa, Artificial Sequence
  Synthetic
DELERLLEELERNSRENKKRLDESRKRVKEVLDRIEKKLRDVLREVEDVLRKIREKLERK

SEQ ID NO: 23978 - protein, 60 aa, Artificial Sequence
  Synthetic
VKDKVKELRDRVKELLDRNREEVRKSEEDSKRVLDEVKRLVDELRERLREIRKRVEEEAK

SEQ ID NO: 23979 - protein, 60 aa, Artificial Sequence
  Synthetic
SELEDVRRELEENSRRNEETLRRSLAELEENSERNRRELERVLAEVEKVLKKATETLSRV

SEQ ID NO: 23980 - protein, 60 aa, Artificial Sequence
  Synthetic
VRKEVKKVEDDVRRILEENRRLVEESERRSRRILEENEELVEDIKRKLREIEKELRERVR

SEQ ID NO: 23981 - protein, 60 aa, Artificial Sequence
  Synthetic
SEVEELEREIRELVERNRELVRRLEEEARRLSRRNEELVRELKERAERLVKELKERLDRV

SEQ ID NO: 23982 - protein, 59 aa, Artificial Sequence
  Synthetic
KDTLDEVRKEVRKLSKENEERLREVLEESRRLSKRNEEILKEIAERVKRLVDKLTDDIR

SEQ ID NO: 23983 - protein, 57 aa, Artificial Sequence
  Synthetic
SEVEDVERRVRKLLEENDRLLEENEKSARELMKRDKKVSDENEKSVRDLLDRLRKEI

SEQ ID NO: 23984 - protein, 56 aa, Artificial Sequence
  Synthetic
LEELLKKLRKLSEDNERLLRESNERAKRSTDESERLSRETNERVKDVVTRLKEASK

SEQ ID NO: 23985 - protein, 57 aa, Artificial Sequence
  Synthetic
DEVDEARKEVDKLAKENTELVKRNKDSVKELVREDEDELRKNRESVDELLRRLEEEI

SEQ ID NO: 23986 - protein, 56 aa, Artificial Sequence
  Synthetic
LEEVLKTLREVSDRNKKLLEESNERVRKSTKESKDKLRKSNEEVKRVLKELRDTDT

SEQ ID NO: 23987 - protein, 59 aa, Artificial Sequence
  Synthetic
DELDRLLEEVKRSLEDVEEKLKKLEEEVKRVNDELRKRLTRLLREVERSLKRVEDLIRN

SEQ ID NO: 23988 - protein, 56 aa, Artificial Sequence
  Synthetic
LEEVRERLKESLDRLRKRVEDLKRRLRESLESVRKLVEDLERALRKSLEELRERVR

SEQ ID NO: 23989 - protein, 59 aa, Artificial Sequence
  Synthetic
EELDRLLKRVEESLRRVERILKELLDRVRKVNEDVKRTLDDLLRRSKESLDRVRKLREE

SEQ ID NO: 23990 - protein, 56 aa, Artificial Sequence
  Synthetic
LEEVEERLKRSLRELERLVRELEEELKKSVKSVRDLLEELKRRNEDSLRRLAEEIK

SEQ ID NO: 23991 - protein, 59 aa, Artificial Sequence
  Synthetic
KELDDLLREVERSLDRVRKRLEDLLREVERVNEEVKKRLRDLLEELKRVADELRKLRED

SEQ ID NO: 23992 - protein, 56 aa, Artificial Sequence
  Synthetic
LEDLERELKRSLKELRDEVRELEERLRRSVESVRRVLKELEERARRLLKEVRDEIK

SEQ ID NO: 23993 - protein, 59 aa, Artificial Sequence
  Synthetic
SELDKLLEDVKRSLDEVKRLLKELLDRVKKVNKELEEVLKRLEEDSRRVVEEVEKATRD

SEQ ID NO: 23994 - protein, 56 aa, Artificial Sequence
  Synthetic
LEDLERKLEDSLRRLEELLRRLEDELRKSLTSVRKRVKELEEKNRELLKRVEEKIR

SEQ ID NO: 23995 - protein, 59 aa, Artificial Sequence
  Synthetic
KELDELLKRIEDVVRRLEEELKRLLDEARKVNEDLERRLRKLREDVERSLREVDKMIRN

SEQ ID NO: 23996 - protein, 56 aa, Artificial Sequence
  Synthetic
LKDLEKALEELLDRVRRLVKELRDRLRDSLRSVEEEVKKLKDELDRSRKAVRDKVK

SEQ ID NO: 23997 - protein, 59 aa, Artificial Sequence
  Synthetic
SELDRLLERVRKSSTDSEKTLKELRDEIRRVNDEVRKVLEELLKESRRVAEEVKKVIDN

SEQ ID NO: 23998 - protein, 56 aa, Artificial Sequence
  Synthetic
LEDLERELRRLLRRDRELVKKLEEDLRRSLKSVEEEARRLERANRELLREVEEKAK

SEQ ID NO: 23999 - protein, 59 aa, Artificial Sequence
  Synthetic
SELDKLLRDVEESSRRSEETLRKLEKEVRDSSTESERILRELRDRIKKVADDVEKVIRD

SEQ ID NO: 24000 - protein, 56 aa, Artificial Sequence
  Synthetic
LEELEKRLEDLLRRDKKLVDDLRKKLRDLEKRDRDLVEELRRELEELLKRVEDAAR

SEQ ID NO: 24001 - protein, 59 aa, Artificial Sequence
  Synthetic
SELDRLLREVEKSSKRSEETLRDLRREVEDSSRRSEEILRRLLEESEKVAREVRKLIED

SEQ ID NO: 24002 - protein, 56 aa, Artificial Sequence
  Synthetic
LEELEKRLRELLKRDKELVDELRKRLEELLKRDRELLKRLEEENRRLLEEVERRAR

SEQ ID NO: 24003 - protein, 59 aa, Artificial Sequence
  Synthetic
KELDELLDEVRRSSETSERILRKLLREAEESTDRSKRTLKELLRELEEVVERVKKMIRD

SEQ ID NO: 24004 - protein, 56 aa, Artificial Sequence
  Synthetic
LKDLEKALRDLLDRDRKLVEELEDRLRKLAEEDEKVLRELEEELKRLLEEVAEETR

SEQ ID NO: 24005 - protein, 60 aa, Artificial Sequence
  Synthetic
SLLEKLERDLERVHKESEDLARELRKELKRVHEESRELMKEIDKELRRVLEEVKSLLRRG

SEQ ID NO: 24006 - protein, 62 aa, Artificial Sequence
  Synthetic
EDVKDKVRRVEEKVEELLDRNRKLVEEVRREVEKVLRDDRRLVREVERKLKEALDEVRERVR

SEQ ID NO: 24007 - protein, 60 aa, Artificial Sequence
  Synthetic
SEVEEVERRVDEVLKELKRKVDRSREESERIARELERLVEESEKKVRDVVRELEDLLRKV

SEQ ID NO: 24008 - protein, 54 aa, Artificial Sequence
  Synthetic
DLKEKIKEVEDRVDKVIKENKDLLDDVERRVRKVIKENEDLIKELRKRVEEVAR

SEQ ID NO: 24009 - protein, 60 aa, Artificial Sequence
  Synthetic
SKVEELEKRVRKVMEKLKKLLKDSEKESDDVARRLEELLEESEREVREVLRELEDLLRKV

SEQ ID NO: 24010 - protein, 54 aa, Artificial Sequence
  Synthetic
DVDETIKRVEEEVKKVVDDNRRLNEEILRKVKKVIDDNRRLIEKVREDVDRMAK

SEQ ID NO: 24011 - protein, 57 aa, Artificial Sequence
  Synthetic
SVVETVDKRLKRLLEKVEKSTEDSRRTAEESKKRVDRSTERVKEVLDRLRREVERLK

SEQ ID NO: 24012 - protein, 59 aa, Artificial Sequence
  Synthetic
KEKVRTVEKRAEDVIREARKLLEESKRRHDKVVEELERLLKKSKEDVDRVIKELEERRK

SEQ ID NO: 24013 - protein, 57 aa, Artificial Sequence
  Synthetic
DEVEEVKKRLDELRKEVERSTREVREVLKKLLKEVKDSTDDVRRTIEKLLRDVERLK

SEQ ID NO: 24014 - protein, 59 aa, Artificial Sequence
  Synthetic
KEELKKVEDRVREVIKDLEELLRDSKRTVEKVERELEDLVRKSEEEAERVERELEERAR

SEQ ID NO: 24015 - protein, 56 aa, Artificial Sequence
  Synthetic
SVVEEVDRLLEELLRKVKKSTDESKETAKESRKEVKRSTEDNDRTVEKLRDEVRRL

SEQ ID NO: 24016 - protein, 59 aa, Artificial Sequence
  Synthetic
DDRVREVETRVKKVIDDVRRLVTESKKDHERVVKELRELVEESKRRNDRVVEEAKETAR

SEQ ID NO: 24017 - protein, 56 aa, Artificial Sequence
  Synthetic
SMVEEVKKVLEKLKRDVDKSTDEVRDMLRRLLEEVRESSREVERRLRELKEEVDRF

SEQ ID NO: 24018 - protein, 59 aa, Artificial Sequence
  Synthetic
KEEVKKVKKEVDEVIRRLKELVRRSEEEARRVIKTLEKLLRDSKKRVEDVIKDLDRTVR

SEQ ID NO: 24019 - protein, 57 aa, Artificial Sequence
  Synthetic
SMVEKVEEDLKKLTRDVEKSTEESRKTAEDSARDVRRSSREVEDVLRRLRKEVEELK

SEQ ID NO: 24020 - protein, 59 aa, Artificial Sequence
  Synthetic
KEEVKKVEDKVKEVIERLKKLLDESKKRHEDVIRELEKLLEESERKVRKIIRELEETLR

SEQ ID NO: 24021 - protein, 57 aa, Artificial Sequence
  Synthetic
SVVEEVKRRLEELEKRVEDSTRDSKRTLDESERELEESSRDNRRTVEELLDELRRLK

SEQ ID NO: 24022 - protein, 59 aa, Artificial Sequence
  Synthetic
KEEVEKVEREVREVIKKLRDLVRRSREEHEKVIEKLKRLLEESEDTNRKVIKKVEDDLR

SEQ ID NO: 24023 - protein, 61 aa, Artificial Sequence
  Synthetic
SVTDEVREKLRRLLEELREVVKRVEDISRKTHEETKRVVEKVKRILEKLKREIEEVIRELG

SEQ ID NO: 24024 - protein, 59 aa, Artificial Sequence
  Synthetic
KEDLERLRRDVERVIREIEKLLRDVEEKVKETIKTDEDLLRRVKEDVERVLEEIDRRLK

SEQ ID NO: 24025 - protein, 61 aa, Artificial Sequence
  Synthetic
SVAETVKERLKDLHRRTKESNERAKRISDELNKHNEKSVRDVDREVKRLLEEITEVIKRLG

SEQ ID NO: 24026 - protein, 59 aa, Artificial Sequence
  Synthetic
KEALRKLDEEVKKVADDDRRLNEESRKRAKDSIEESRKLVRDVAERVKEVARKIREDLR

SEQ ID NO: 24027 - protein, 60 aa, Artificial Sequence
  Synthetic
DEARELIERVKRVLDRVREENTRVNKELHDILRRVEKRNRDLLRELREILKDVKKKADEV

SEQ ID NO: 24028 - protein, 55 aa, Artificial Sequence
  Synthetic
RELEKELRRLIAEVARIVEESRRNLERIEEAIKRISETSEKEIREIEDRIKKDVD

SEQ ID NO: 24029 - protein, 60 aa, Artificial Sequence
  Synthetic
SEAERAREEAKKLKEEIKKSNDELRKAAEKLKRDIERSNDELRKAIEELKRRVESLLRRV

SEQ ID NO: 24030 - protein, 55 aa, Artificial Sequence
  Synthetic
DEVLKEVKRIAEELHRHNREVLERIEKIARELEKHNRDVLDDIRRIVEKLERDLN

SEQ ID NO: 24031 - protein, 60 aa, Artificial Sequence
  Synthetic
SEEERAREDLERLREEIRRSNEKLEEDSDKLRRDIEESNRRVEEEIRRLKEDVERKLKDV

SEQ ID NO: 24032 - protein, 55 aa, Artificial Sequence
  Synthetic
EEVLEEVRRLVKKLHEHNEESLRRSEEILKDLERHNRDVLREVEEIVREALERLD

SEQ ID NO: 24033 - protein, 60 aa, Artificial Sequence
  Synthetic
REAEEAKKEADRLEEEVRDSNRKLEEDSKRLEREIRESNRKLKETAERLLRDVERLLKDV

SEQ ID NO: 24034 - protein, 55 aa, Artificial Sequence
  Synthetic
KEVLEDIRRIVKELHDHNKKSMEDSRRIIEELKRHNKRVIDEVKKIVDELREKLR

SEQ ID NO: 24035 - protein, 60 aa, Artificial Sequence
  Synthetic
REAEEAEKELKRLEDDIKKLVEDLDREAKRLKKEVDDSNRELEKESRRVKKEVRELLKDV

SEQ ID NO: 24036 - protein, 55 aa, Artificial Sequence
  Synthetic
DRMLEKVKRIVDELRKLLKTVLDDVRRIVEELHRHNKESMERTRKILEDLARRLT

SEQ ID NO: 24037 - protein, 60 aa, Artificial Sequence
  Synthetic
SEAERAREVLERLREEVERSNKRVREELKRLTEDVRRSNKKLREDSEEVRKRVEDLLKDV

SEQ ID NO: 24038 - protein, 55 aa, Artificial Sequence
  Synthetic
DEMLRRVRRIIEELHRLNKEALDRVRKIIEDLHRKNEDSLKKTEDILRRLEEELR

SEQ ID NO: 24039 - protein, 56 aa, Artificial Sequence
  Synthetic
SSIEEVLERLRRLSDEVRKRTDDVLERAREISRETEERSRRINEEIERIVEELKKR

SEQ ID NO: 24040 - protein, 59 aa, Artificial Sequence
  Synthetic
KEAVDRARREVERLVKENEDILKRLEEEVRKLVKRNEDLVEENRREVEKWRKELEDRKR

SEQ ID NO: 24041 - protein, 56 aa, Artificial Sequence
  Synthetic
SEIDEVLKKLRDDSKKVEEDTRRVLEELERISEKTRKDSEEVLREIEDIVEKLKRR

SEQ ID NO: 24042 - protein, 59 aa, Artificial Sequence
  Synthetic
REEVERAEEEVRKLVEENKRIVKEAKERVDELVERNKEIVEEIRREVERLKKELEDRRR

SEQ ID NO: 24043 - protein, 57 aa, Artificial Sequence
  Synthetic
REVEEVTKELRKISKEVEDLTREVLREAREISRRTEEESRRLNKEIAEIVERLRREG

SEQ ID NO: 24044 - protein, 59 aa, Artificial Sequence
  Synthetic
KEDVRRVAEEVKRLVDKNRRIVEEAKKEVDRLVKRNEDLMRRNREEVERWKRELEEDRR

SEQ ID NO: 24045 - protein, 57 aa, Artificial Sequence
  Synthetic
SEVDEVLKTLKKLSDDARKKTKEVLDRLRDISRRVEEESRKVLEEIRRKVEEVKKRR

SEQ ID NO: 24046 - protein, 59 aa, Artificial Sequence
  Synthetic
KDKVRKVKEDVRRLVEDNKRIVKEAREEVERLKERNKDIVRRIKETVDRLKDELRKRAE

SEQ ID NO: 24047 - protein, 57 aa, Artificial Sequence
  Synthetic
SDVDRVLKELEDISKDVEDKTREVLKRLKEISDEVKKRSEDINREIARIVEDLERRR

SEQ ID NO: 24048 - protein, 59 aa, Artificial Sequence
  Synthetic
KEKVKDARRVVRELVERNKEIVRRAAEVVKKLKKENAKLVEDNTREVKKWKERLERRRR

SEQ ID NO: 24049 - protein, 57 aa, Artificial Sequence
  Synthetic
SEVEDLLRKLKEISDESRERIKRLLEELEEISRKSKEDSERSNEELHRIVKRLKEEN

SEQ ID NO: 24050 - protein, 59 aa, Artificial Sequence
  Synthetic
EEDLRRAEDDVRRLIEDNKRLLEEAKRRVDDLRRKNEEILRESEKNVRRIEKELEDRRR

SEQ ID NO: 24051 - protein, 57 aa, Artificial Sequence
  Synthetic
SEVEDLLRKAEEISDRSRREIEKLLRELERIVREVRERSKRSNDELHRIVKELKEER

SEQ ID NO: 24052 - protein, 59 aa, Artificial Sequence
  Synthetic
EKKLRDVEKRARELIRDNERLLEDAKRRVDELRRELKKILDDSRRNVERIMKELDDEKR

SEQ ID NO: 24053 - protein, 57 aa, Artificial Sequence
  Synthetic
SEVDELLKRLEEISEESRRRSEDSNREVHEIVKEVKKRSEDSNRRLHKIVEDLKREN

SEQ ID NO: 24054 - protein, 59 aa, Artificial Sequence
  Synthetic
KDELKRAEDRVRELIKENKRILDESKENAERIDRELKKILEDSKRNVEEIAKRLEEDRK

SEQ ID NO: 24055 - protein, 57 aa, Artificial Sequence
  Synthetic
KDVEKLLRELEKISEDSKRESDKSNKEVHDSSREVERRSRESNRRLHKVVEDLKRTN

SEQ ID NO: 24056 - protein, 59 aa, Artificial Sequence
  Synthetic
DEDLRRAKREVERLIRENEKILEDSRENLRRIAERSRRVLEESERNVRRLIEELEETRR

SEQ ID NO: 24057 - protein, 57 aa, Artificial Sequence
  Synthetic
REVEELLKDLRRILEEVKRRIEKLLDELRKISEESRRRSEKSNEELHDIVKKLKDEN

SEQ ID NO: 24058 - protein, 59 aa, Artificial Sequence
  Synthetic
EKTLRDAEREVKKLIDTLRKILEDARREVKKLIDKNEKILRDSEKNVRDIAEELRRTRK

SEQ ID NO: 24059 - protein, 57 aa, Artificial Sequence
  Synthetic
DEVRELLREVKEAVDEVRRRSEESNREAHRVSEESEKRSRESNKRLHEIVEDLKRRN

SEQ ID NO: 24060 - protein, 59 aa, Artificial Sequence
  Synthetic
EEKLKRAEEEIRKVIEDLRRILRESRENAKRIIRRNREILRESKKNVEDLERELEETRR

SEQ ID NO: 24061 - protein, 57 aa, Artificial Sequence
  Synthetic
SEVEELLKRLRESSRRVRELSKRSNEEVHRSSDKVRRDSEESNRELHKIVEDLKREN

SEQ ID NO: 24062 - protein, 59 aa, Artificial Sequence
  Synthetic
ERKLREARKEVKKLIEESREVLERSERNIRELIKESRRLLEESRRNVERLKKELEDTRK

SEQ ID NO: 24063 - protein, 60 aa, Artificial Sequence
  Synthetic
SEEDEARKDVKELEDRLRKINEDSERAVRRIEEELKRILEENDREVKRLLRKIEELLRRK

SEQ ID NO: 24064 - protein, 56 aa, Artificial Sequence
  Synthetic
IETVIRELRKALEEAARRSKRLIDELKKVLEEVKRANEETNKRLTEVVEEVAERIR

SEQ ID NO: 24065 - protein, 60 aa, Artificial Sequence
  Synthetic
KEKEDAEREVERLERESRRVNRESEEEIKRLLRESEKVNEDSEREVRRIREELERLLRKK

SEQ ID NO: 24066 - protein, 56 aa, Artificial Sequence
  Synthetic
IDKVLTELRRSSEEVTRLSEELIERVARSSRKVKELSRKLIEELRKVLKDVARRLE

SEQ ID NO: 24067 - protein, 60 aa, Artificial Sequence
  Synthetic
EELERLEKDLREVIKDSERSSDDVRRRLEEVIRDNERLLEELDERLKEVIRDVEDLLRKK

SEQ ID NO: 24068 - protein, 59 aa, Artificial Sequence
  Synthetic
KKLIDDLRRKIEESLKDSRRLDEEARKEIERISRKTREDIKELLDRIKEVLDEIRERIR

SEQ ID NO: 24069 - protein, 60 aa, Artificial Sequence
  Synthetic
DELEDLERKLKEIIDDSKRLLDELEKRLRESNREVERLLDELRKELEKVIRDVEELLKKK

SEQ ID NO: 24070 - protein, 59 aa, Artificial Sequence
  Synthetic
KELIDKLVRELEKSLEESRRLIEELRKEIERTSREIEKRIRDLLKEIKDVLDDIRRRIE

SEQ ID NO: 24071 - protein, 59 aa, Artificial Sequence
  Synthetic
SELEEVEKRAEELARTLEELNRDVNRRLEELLRRLEKINRTVNDELRKLLEELKDVRRR

SEQ ID NO: 24072 - protein, 59 aa, Artificial Sequence
  Synthetic
KEDLDRLDKRVRDIVRDLERINEETRKTLEEIRERLERILKRTEENLKEIKEEVRKDEK

SEQ ID NO: 24073 - protein, 60 aa, Artificial Sequence
  Synthetic
SELEKVTEDVRRLLERLRDINRRVNEALRRLAEELKRLNDEVNKLLRELVTELKKASKDG

SEQ ID NO: 24074 - protein, 59 aa, Artificial Sequence
  Synthetic
KDKLEELKREVERIEKDVREILKRTEDNLRRIVEELKEINERTEDSLRKIVRELSEDRK

SEQ ID NO: 24075 - protein, 60 aa, Artificial Sequence
  Synthetic
REKDELRKKVEELLKRLEEISKRTKDSVERVLRELDKITKESKKRAKKLVDRLKELLKRV

SEQ ID NO: 24076 - protein, 59 aa, Artificial Sequence
  Synthetic
ERAIEEVLKTIEELIKEVEDVNRRVNETIRELLERLRRANEDVIRKVEKLIKEVEDATR

SEQ ID NO: 24077 - protein, 60 aa, Artificial Sequence
  Synthetic
SEKERLRDMLRKIRETLDRISEDTKRSLDEVRRRLEEISKRTKDNARKLVRELEELLRRV

SEQ ID NO: 24078 - protein, 59 aa, Artificial Sequence
  Synthetic
EEFVKRVEDTLRELLDRVRRENERVNRDIDRLLKEVEERNKRVNDELRKLIEDVKEAAR

SEQ ID NO: 24079 - protein, 60 aa, Artificial Sequence
  Synthetic
DDVRELIERLERILKRVEDINRDVNRKLRRVLERVRKDNEDSNRKTEKVLRDVKERADEI

SEQ ID NO: 24080 - protein, 59 aa, Artificial Sequence
  Synthetic
EKLLRDVERELKRVREDLERILRESRDVVRRVKEELDKILEESRRKVEKVRKDLEDTRK

SEQ ID NO: 24081 - protein, 60 aa, Artificial Sequence
  Synthetic
SEVEKLITDLRRILKEVEERNRELNKRNDETLKRVEETNRRVNKELKEILDRVIDEARRK

SEQ ID NO: 24082 - protein, 59 aa, Artificial Sequence
  Synthetic
EDLLRRVEEELRKVEKDLKRILDKSRDDLRKSRERLERILRRSEEIVREVEERLRRAAT

SEQ ID NO: 24083 - protein, 60 aa, Artificial Sequence
  Synthetic
DEVRKIIKELEEILEEVRKRNEKLIRENEETLERVRKINEKAIRELEDILRRVKEAVERK

SEQ ID NO: 24084 - protein, 59 aa, Artificial Sequence
  Synthetic
EDVLRDAERRVREVREKLERINKTSRDRLKRSKEEADRINKESREVVKRVKEELEKTAT

SEQ ID NO: 24085 - protein, 60 aa, Artificial Sequence
  Synthetic
DEVERVIRELERILREVEKRNRDVLRKNEETLREVRERNERAIEELRRILKKVKEEAERK

SEQ ID NO: 24086 - protein, 59 aa, Artificial Sequence
  Synthetic
EDVLRTVRKKVEEVREALDRINETVKKALDDSRRRLEKINRDVRRDVEKVREDLERTAT

SEQ ID NO: 24087 - protein, 60 aa, Artificial Sequence
  Synthetic
DEVKKLIDDLRKILDRVRKENRRVIEELRKILEDVERRNREAIERLERILRRVVDLMRKK

SEQ ID NO: 24088 - protein, 59 aa, Artificial Sequence
  Synthetic
EEVLKRVREEVDRVRRELDRINEDSERVLRDVARELERINREVRKRLKEVEKRLREAAK

SEQ ID NO: 24089 - protein, 60 aa, Artificial Sequence
  Synthetic
SEVEKIIKELREILERVREDNRKIIDDLRKILKEAEDTNRKVIKELKEILKDVSKLMKEK

SEQ ID NO: 24090 - protein, 59 aa, Artificial Sequence
  Synthetic
EELLKEAEKDVRRVKEKLDKINRDVREELKKVAEDVKRINDRSREELRRVKEELKKDSD

SEQ ID NO: 24091 - protein, 60 aa, Artificial Sequence
  Synthetic
KEVEKVIEELRKILDDARRENERLLRELEEILKRVEERNRKLLEDLRRILEEVRKKAKDI

SEQ ID NO: 24092 - protein, 59 aa, Artificial Sequence
  Synthetic
EEVVKRVEEELKKVKEDVERINKEVRDRLREVEERLEKINEDTERTLKKVKDELEETKR

SEQ ID NO: 24093 - protein, 60 aa, Artificial Sequence
  Synthetic
DELRDVLRRLREVLTELEKENRKSIEELKKLNEDVARDIKRVIDELRKLLKRVKEEIEKN

SEQ ID NO: 24094 - protein, 55 aa, Artificial Sequence
  Synthetic
EEVRKELEDVRRKAEKILRDNDERLKESNRHMEKLLREVKEELKRVRDAVEEARK

SEQ ID NO: 24095 - protein, 60 aa, Artificial Sequence
  Synthetic
DEVRDVIKKLKDLNDRLDDENKKSIEDLKRELERLERRNRDSIRRLEELLKDVADKIRRR

SEQ ID NO: 24096 - protein, 55 aa, Artificial Sequence
  Synthetic
KDVRKRLRESNEHMKELLKENKELLKRLEDEVKRILERNKKELDRVLRRAEELRK

SEQ ID NO: 24097 - protein, 60 aa, Artificial Sequence
  Synthetic
RSVEEVRKVLEELKREHEKISKKTEEVLEDLKRRHEEIIKRVRDVLREIEEDLRRIRSRV

SEQ ID NO: 24098 - protein, 59 aa, Artificial Sequence
  Synthetic
DEKVEKVIRELRRSVEDSKRRNDEAIRRLEESVRKSSDEVRRAIKELRDLLKKVRDTTK

SEQ ID NO: 24099 - protein, 60 aa, Artificial Sequence
  Synthetic
STVERVREEADRLRKEHERISDETRKVLRKLEEDHERISRRTEELIERIEREVRKIESRV

SEQ ID NO: 24100 - protein, 59 aa, Artificial Sequence
  Synthetic
DEKVKRVEEEVRRSVEESKKENKKVIDDARRSVKRSEDRNREVIKEVKRLLDTVRERAK

SEQ ID NO: 24101 - protein, 60 aa, Artificial Sequence
  Synthetic
STVEDVRRRADELRRRHKKISEETERVLRRIEEAVRRILEDLRRILKEIEDRVRELLSRV

SEQ ID NO: 24102 - protein, 59 aa, Artificial Sequence
  Synthetic
DEKVKEAKRRVTESVRKSKDRNRRVIEEVDRLLKRVEEEVRRVKEEAKELLREVAERTK

SEQ ID NO: 24103 - protein, 57 aa, Artificial Sequence
  Synthetic
SSVEKVIEDLRRISEKVKKRTEDVLREAEKILRRVEKDNKKVNDDARRIVEELERRG

SEQ ID NO: 24104 - protein, 59 aa, Artificial Sequence
  Synthetic
KRLVDRVREAAKDIEDENREVLRRVEEILRRIEEELKRSSDETEKAVREIKRRLDERAR

SEQ ID NO: 24105 - protein, 57 aa, Artificial Sequence
  Synthetic
EEVERVLEEIKRISTDVARRSKEVLKRARESSERVKRRTEEVLEEIRKTNEDVARRA

SEQ ID NO: 24106 - protein, 59 aa, Artificial Sequence
  Synthetic
KKVVDRLRKEVKRNEDENREMVREVEEEVRRLEKENEEAVRRAADIVRRSEEHLRERTR

SEQ ID NO: 24107 - protein, 60 aa, Artificial Sequence
  Synthetic
KEVEDLLREVEKSSEKVRELIERSIRELERILEKVAEEIRRSIEELEKILERVAEVAKRR

SEQ ID NO: 24108 - protein, 59 aa, Artificial Sequence
  Synthetic
EKIVKRVEDEIRRLMKKSDELLERSTKVVEDIKRELEKLLETSSRMAEDIKRKLEELRR

SEQ ID NO: 24109 - protein, 60 aa, Artificial Sequence
  Synthetic
SEVEKLIEELERILEEVARRLKKSNEDLRKILKEVAKRIKDSIRDLRRILEEVADELRRR

SEQ ID NO: 24110 - protein, 59 aa, Artificial Sequence
  Synthetic
ERIVEEVERAAEEIKRRLEELVRRSEKSVEEIERELRKLLKDSSDVVREIKKRLEDERR

SEQ ID NO: 24111 - protein, 60 aa, Artificial Sequence
  Synthetic
SEVEKLLKEVEDSSRKVEEDLRDSNRELKKILDEVADRIRKSIKRLEDILKKVAEDAKRR

SEQ ID NO: 24112 - protein, 59 aa, Artificial Sequence
  Synthetic
EKIVRDVERRVRELKERSRRIVEESERSAREIKRELKRLEDDSSRVVEDIRKKLEELAK

SEQ ID NO: 24113 - protein, 60 aa, Artificial Sequence
  Synthetic
REVEELIKRVEESSRDVERRLRESNEEVERSTRRVAEEIKKSIDRVREIVERVERKKERV

SEQ ID NO: 24114 - protein, 59 aa, Artificial Sequence
  Synthetic
EKIVERVRRVIEELKRRSDEIVKESERSVRRVEKETTELLEESSRAVERVERRLRELVR

SEQ ID NO: 24115 - protein, 60 aa, Artificial Sequence
  Synthetic
SEVEKLIEEVRRSSKKVEEDLDRSNRELEDILRRVAEELEKSNRELEKILKEVAERVKRR

SEQ ID NO: 24116 - protein, 59 aa, Artificial Sequence
  Synthetic
EEIVKRVEEEARRLKERSREIVKRSEDSAREITKALRKLVRDSEDSVRKIKEKLKEETR

SEQ ID NO: 24117 - protein, 60 aa, Artificial Sequence
  Synthetic
REVEELDKRLKESSTEVEERLRRSNREVEDSTRRVEEEARKSNEELREILERVAEDVKRR

SEQ ID NO: 24118 - protein, 59 aa, Artificial Sequence
  Synthetic
ERIVERVERSARELMRRSRDIVRRSKESIERLKKRTRDLVKESRESVEKIKRDLEELRR

SEQ ID NO: 24119 - protein, 59 aa, Artificial Sequence
  Synthetic
SEVEKLLKELEDSSKKVEDDLRKSNEELRKIVEEVADLIRRLNKELEEILREVRERMRR

SEQ ID NO: 24120 - protein, 59 aa, Artificial Sequence
  Synthetic
EEIVRRVEKIVRDLKRRSDELVRRSRKSVEEIRKELEELVERDRRSVERIKEELDKERK

SEQ ID NO: 24121 - protein, 60 aa, Artificial Sequence
  Synthetic
SEVEKLTKEVRDSSKRVEDELRKSNERLKESTDRVADEIRRLNKELKEILDKVAREVERR

SEQ ID NO: 24122 - protein, 59 aa, Artificial Sequence
  Synthetic
EEIVERVERDARKVKEDSKRLVEESEESVRRLKTDTERLVEEDKKSVDTIKEELKKLTK

SEQ ID NO: 24123 - protein, 59 aa, Artificial Sequence
  Synthetic
DEVEELRKELEDSSREVEELIRRLNKEVEKSTREVAKRVKDSNKRLDEILKKVAEEVKK

SEQ ID NO: 24124 - protein, 59 aa, Artificial Sequence
  Synthetic
REIVERVREEVEKLKKRSEDLLERDKESIDKLDKETKELVEESRKSVRDIERELKKLSD

SEQ ID NO: 24125 - protein, 60 aa, Artificial Sequence
  Synthetic
DEVEKLIKDVEDSSREVEERIRDLNRKAKKIVREVAERIRELNERLKEILDKVAEEVKRR

SEQ ID NO: 24126 - protein, 59 aa, Artificial Sequence
  Synthetic
EEIVKRAEKRIRELKKKSDELLKRDRDSMDRIKKELEKLTREDEESVRRIERELKRLAD

SEQ ID NO: 24127 - protein, 60 aa, Artificial Sequence
  Synthetic
SEVEKLIEEVRRSSEEVERRIKKLNDDVRRSTEKVEEDIRRLNEELKKILDEVAKEMERR

SEQ ID NO: 24128 - protein, 59 aa, Artificial Sequence
  Synthetic
ERIVRRVEKIIRDLKKRSDELLKEDRRSAEEAKRETDRLVEEDKRSVDEIRERLKELSR

SEQ ID NO: 24129 - protein, 60 aa, Artificial Sequence
  Synthetic
DEVEELLRRVEEIVERVAKRIEELNRRLEEILEEVARRSTKSIKELEDILRKVAKEMERR

SEQ ID NO: 24130 - protein, 59 aa, Artificial Sequence
  Synthetic
EEIVERVERRIRELKKRLEKLVRDDEESVKEIRKKLEELVKRSSDVVERIKRELDKLRK

SEQ ID NO: 24131 - protein, 59 aa, Artificial Sequence
  Synthetic
SEVEKLLRELRESSREVEERIRKLNRELEKIVRDVDRESARSIEELKRIAEEVAERAKR

SEQ ID NO: 24132 - protein, 59 aa, Artificial Sequence
  Synthetic
ERIVKEVEEEVRRLKKRSTKLLEDDRKSVEDIKERLKELVRRSSEVVKEIEERLKRLEK

SEQ ID NO: 24133 - protein, 60 aa, Artificial Sequence
  Synthetic
SEVEDLLRRVRESSKEVEERIRKLNDELRKSTKEVEDRSRRSIERLDRIVEKVAREVERR

SEQ ID NO: 24134 - protein, 59 aa, Artificial Sequence
  Synthetic
EKIVRDVEREVRRVKERSDRLLEEDRKSVEELKTRTDRLLEESSKRAEDIKRKLKELEK

SEQ ID NO: 24135 - protein, 60 aa, Artificial Sequence
  Synthetic
SEVEKLLREAKESSREVKDRSKKSIDELRESTKTVERLIRDLNRKLKEILDRVADDMRRR

SEQ ID NO: 24136 - protein, 59 aa, Artificial Sequence
  Synthetic
EKIVRRVEEIVRRLKKESKDLVEESTRVADELRRRTDRLVEEDERSVRKIKEDLDRLRK

SEQ ID NO: 24137 - protein, 60 aa, Artificial Sequence
  Synthetic
SEKEEAKRRARELEKRTDELLEESTRVNEESKRHLKELLDESRRTAKRVKEEIDKLLKEK

SEQ ID NO: 24138 - protein, 56 aa, Artificial Sequence
  Synthetic
VDTLLERVDRSSKEVADRMRKSNEEVKDVNRRVAKALKDSNRDVERVLEDVARKIK

SEQ ID NO: 24139 - protein, 60 aa, Artificial Sequence
  Synthetic
SEKETARKVIEELRKETERLLRESTKTNEDSSRHAKELLKRSEDVAREIEERIDRLLEEK

SEQ ID NO: 24140 - protein, 56 aa, Artificial Sequence
  Synthetic
IEEVIKRLEDSSRDVERRLRKSNEDVKRVNKEVADRLKESNDRLREELKKVEDDIR

SEQ ID NO: 24141 - protein, 60 aa, Artificial Sequence
  Synthetic
DEKEDAERKIRRLEERTKKLLDDSTKTNKESRDHLRKLLADSEKTARDIKRAIKKLLDDK

SEQ ID NO: 24142 - protein, 56 aa, Artificial Sequence
  Synthetic
VDTLLTEVTDSSRRVEEELKRSNDEVRRVNREVAERLKKSNRELEEVLRKVAEDIK

SEQ ID NO: 24143 - protein, 60 aa, Artificial Sequence
  Synthetic
SERERAEEEAKKAKKEAKRLLDESTKANEDSKRHADKLLEDSKRAAEDIKRKAEDLLRKK

SEQ ID NO: 24144 - protein, 56 aa, Artificial Sequence
  Synthetic
ARRAIEEVRRALKEAADASRDLNRRAKEANERAAKASEELNKRAEDALRRASEEIR

SEQ ID NO: 24145 - protein, 60 aa, Artificial Sequence
  Synthetic
SEKEEVKKRVDEIKERLKRLLDDSTRTNEESRKHIEDLLEESKKEIDKVRKDLERLLRKK

SEQ ID NO: 24146 - protein, 56 aa, Artificial Sequence
  Synthetic
VDTMTRKVEEVLRDVAEKIKELNRRVEEANKDMARESERLNREVRDVLRKVAKDIE

SEQ ID NO: 24147 - protein, 60 aa, Artificial Sequence
  Synthetic
SDEDRAREDLKRIKEELKRLLRESTEVNKESEKHIRKLLRESEETIRRLKKAIDDLLRKK

SEQ ID NO: 24148 - protein, 56 aa, Artificial Sequence
  Synthetic
IETILRRLERVLKEVEKKSRELNRRVKEVNEKVRRDIERLNKEVKDVLKTVAERIT

SEQ ID NO: 24149 - protein, 61 aa, Artificial Sequence
  Synthetic
DEKERAEERIRELKKRTEELLRESTRVNRESKEHAKELLKRSEDTIRELDERIRRLLERKK

SEQ ID NO: 24150 - protein, 56 aa, Artificial Sequence
  Synthetic
VDTVLARLEESSKEVEDRSKRLNEEVKKVNEEVAKRIKELNEEVERVLRRVAEEIE

SEQ ID NO: 24151 - protein, 59 aa, Artificial Sequence
  Synthetic
SLKEELREKVRKVKEDSERLLRDLERTVKKVREDSKRILDRNRETAKEIERRIRELERN

SEQ ID NO: 24152 - protein, 59 aa, Artificial Sequence
  Synthetic
EELVRKLRKELDDSLKRTKELVDRLKEDLERSLRDSEELARRLDRELEDVLRRIEDEAR

SEQ ID NO: 24153 - protein, 59 aa, Artificial Sequence
  Synthetic
SLLETLKEIVRRVERESARILEDNRRTVTRAKEESKKILDRNAKTVDDLRKEVERLKTE

SEQ ID NO: 24154 - protein, 59 aa, Artificial Sequence
  Synthetic
EELVRRLVEELEKSLRTTERLARELDRKIKESLDTSEELARRLDKRLEEVLKDVKRRAE

SEQ ID NO: 24155 - protein, 59 aa, Artificial Sequence
  Synthetic
RLEEELKKTVDRAREEVKRLLDRDRESVDDLRRAVEEILKTNRRTVEKLRKDLTDLRRN

SEQ ID NO: 24156 - protein, 59 aa, Artificial Sequence
  Synthetic
EKLVRELIEKIKKVLDEVRRLSEKLNEDLREILERVKRLADKLDEELKRMLEKVEETAR

SEQ ID NO: 24157 - protein, 61 aa, Artificial Sequence
  Synthetic
DDVERVKRDIDRLLEKVTRENEKVKEKMKELLDRAREVNRKVKEDIKRLLKEVEDVARREG

SEQ ID NO: 24158 - protein, 58 aa, Artificial Sequence
  Synthetic
EDVRDLERRLREVEEEARKLSEDVRRVLEEVRKELERLSRDTERVLKRVREEIRKIEK

SEQ ID NO: 24159 - protein, 61 aa, Artificial Sequence
  Synthetic
SEVEEVIRRVRKLLKDAKDLNEEVKRRLKELLDRVKRVSEKTKEDIKRLLEEVERVVRTKG

SEQ ID NO: 24160 - protein, 58 aa, Artificial Sequence
  Synthetic
DLAERVRDVLRRVAEAAKELSKDTKRVLDEVKKAIDELLKDNKRTVEEVEKEAKKTLK

SEQ ID NO: 24161 - protein, 61 aa, Artificial Sequence
  Synthetic
DEVEKVKKTLKKLLEDARRRNEEVRKEIEDLDRELERLNRESKKRIEDLLEEVKRVVDRDG

SEQ ID NO: 24162 - protein, 58 aa, Artificial Sequence
  Synthetic
ELVRELERVLDTVRREAERLSRKTREVVDESRRRNKKLLEEDERVVRKVVEDAERKLK

SEQ ID NO: 24163 - protein, 61 aa, Artificial Sequence
  Synthetic
DEVKKVIDDIKDLLRRVEEVSRRVNKELERLLREVREVNKDVKRKLEELLRRVKEVVRRDG

SEQ ID NO: 24164 - protein, 58 aa, Artificial Sequence
  Synthetic
DLAERVRKVLEDVTRAAKELIKRDKKSLEDVKREIEKLSRDVKRVLEKVAEDAKDTLR

SEQ ID NO: 24165 - protein, 60 aa, Artificial Sequence
  Synthetic
SEEEDLARVVERVERDLKRLDDDNKRVLDESRRRNEELVKRTAEIVERVRRELERLRREG

SEQ ID NO: 24166 - protein, 56 aa, Artificial Sequence
  Synthetic
VEEVKRTMEKLLDDVRKANEDSKREIEKSDDEVRKRNEEVVRDIERLLKEVEERAR

SEQ ID NO: 24167 - protein, 60 aa, Artificial Sequence
  Synthetic
SEEEDLRRRAEEVHRRNEELLRDNERTVKKVHDRNRELLEDLRRVVERIERELRRLEEEG

SEQ ID NO: 24168 - protein, 56 aa, Artificial Sequence
  Synthetic
VEEVKERIDRLHEELEKLSRTTKEKLKELHKRLEDVVREVKRRAEELLREIKERAD

SEQ ID NO: 24169 - protein, 60 aa, Artificial Sequence
  Synthetic
SEVEEVRKVVEEVKRELRRLSEDSRRVVEEIVEADKRLSEKNETSVREVKKALKKLKDDG

SEQ ID NO: 24170 - protein, 62 aa, Artificial Sequence
  Synthetic
KDAEELVRDVIRRAREVLKRVEDVHRKVKKDLKKVHDDNKKISEDIDRRLEEVLRKVEEDDR

SEQ ID NO: 24171 - protein, 60 aa, Artificial Sequence
  Synthetic
SEVEDVKRKVREIEKADEELSKRNEDSARESKKRLKEWSDDTKEVVERVRKRLKDLEDEG

SEQ ID NO: 24172 - protein, 62 aa, Artificial Sequence
  Synthetic
EEAERLVREVTKEMKDVHDKNKKLSEDIDKRVEDTNRRLKEVHERVKEEAKKVVRDLEETAK

SEQ ID NO: 24173 - protein, 60 aa, Artificial Sequence
  Synthetic
SLVETVEDVLREVEERLRKLLRDNEESVERIKKRDEDLSKENEESVKRVEDTLDELRERG

SEQ ID NO: 24174 - protein, 60 aa, Artificial Sequence
  Synthetic
VEELVRKVIEDARRLLDDVRRKSERLDREAERVHRENKKLSEDLDRRVKTVVDDVRERAR

SEQ ID NO: 24175 - protein, 60 aa, Artificial Sequence
  Synthetic
SLVEEVEKEARDIERRDDELSKRNEKVARDIEERDRRLSDEVREVVKRVKRELERLVESG

SEQ ID NO: 24176 - protein, 60 aa, Artificial Sequence
  Synthetic
AEKLVRRVIKDLRKLHKENEDLSREIDKRLEDAHKRNRDLVEEVKKRMERVREEVERAAR

SEQ ID NO: 24177 - protein, 60 aa, Artificial Sequence
  Synthetic
KEKEDVKKVVEDIERADKKLSEDNRRVVKRIEEADRKLSKENKESVERAKKRLDDLERRG

SEQ ID NO: 24178 - protein, 62 aa, Artificial Sequence
  Synthetic
EEAEELVRRVIKEMEEVHKRNRDLSKRLDDELKRIHKENEDRLRRLDEEIEKVVKKVEDDAR

SEQ ID NO: 24179 - protein, 60 aa, Artificial Sequence
  Synthetic
SLVEELRKDVEEIKKRLKRLVEENEKVVREVTEADKKLSKELEDEARDVKRALEELRRRG

SEQ ID NO: 24180 - protein, 62 aa, Artificial Sequence
  Synthetic
EEVEELVRRVREDMERVVREVEKVSRDLDREIRRVHRENRELIEDVKRKARKVLRDAEEEAR

SEQ ID NO: 24181 - protein, 60 aa, Artificial Sequence
  Synthetic
KIVEDVEKVVKEVDDRLKKLVDDNERKVREIIRRDEELSEKNEKSVRDVKEELKRLAEEG

SEQ ID NO: 24182 - protein, 62 aa, Artificial Sequence
  Synthetic
EEVEKLVREVIDRMRRVVREVEEMSKRLDEELEEVHRRNRETLTRIDEEAKKVVDDVDRRAR

SEQ ID NO: 24183 - protein, 60 aa, Artificial Sequence
  Synthetic
SVRETLEEVLRRIAEAIDELIKTLEKVLEESRREIERWKKENEDSLREIKKKLEDLEKKI

SEQ ID NO: 24184 - protein, 59 aa, Artificial Sequence
  Synthetic
EEKAKRALEEIKRLLERVKKRVEEALEEIKKSNKEAADIVRDIDRRLEELLRTVADKTR

SEQ ID NO: 24185 - protein, 57 aa, Artificial Sequence
  Synthetic
DEVEEVIKTSREINDRVRRELERVLRRSEEIIEEVAKSIEEVIKESEDIIRKVEKDG

SEQ ID NO: 24186 - protein, 59 aa, Artificial Sequence
  Synthetic
EELKRKIRDVLRDDERAARKWVRDLEEVNKRTEDKIRELLRKLEEVNEKTERDIRRREK

SEQ ID NO: 24187 - protein, 57 aa, Artificial Sequence
  Synthetic
EEVERVIEEIKKLLKDVAELVERVIKEIRKILDDVAKENKRLLDESRKIIKEVAERG

SEQ ID NO: 24188 - protein, 59 aa, Artificial Sequence
  Synthetic
EEVKRKIRKVLKEIKEEIEKLLKKLRDALRDVEEKIRDLTRRAREVNEKSREDLERRKD

SEQ ID NO: 24189 - protein, 57 aa, Artificial Sequence
  Synthetic
DEVEDVIRRLEEIIREVEDRLRKILETSKKIIKEVEDENRRVVTEIERILREVEKRA

SEQ ID NO: 24190 - protein, 59 aa, Artificial Sequence
  Synthetic
EELKRRIEEVLERLRRKIERLAKELKDVNDESEREARRLTEEVKRVLEEVARRIKEAAE

SEQ ID NO: 24191 - protein, 56 aa, Artificial Sequence
  Synthetic
REVEEVRKKIEEDIDRVDKELKEVLETSRDILRRVAKENEDVLRDLERLVDEVRRD

SEQ ID NO: 24192 - protein, 59 aa, Artificial Sequence
  Synthetic
EELKKKLEKVVRDLSKRLEELLKELEKVNEEVKRRLERLTEEVRKVLEEITKKLKERAR

SEQ ID NO: 24193 - protein, 57 aa, Artificial Sequence
  Synthetic
SKVEEVMRRLKEILKRVAEELEKVLTESEKILRDVADENRRVMEESRKILKDVAERG

SEQ ID NO: 24194 - protein, 59 aa, Artificial Sequence
  Synthetic
EEVKKKIDKVLEDVRKELDDLRRKLEEVNKRIEEEIRRLTEDVRRVNDEIRKRAEDRKR

SEQ ID NO: 24195 - protein, 60 aa, Artificial Sequence
  Synthetic
SLREKADEVVKRIKERLDRLEDKSREVVKDSRRKLREWYEKSKRAVEDIETKLDELRKDL

SEQ ID NO: 24196 - protein, 59 aa, Artificial Sequence
  Synthetic
KDMVEELIRELEKIVTDVAKKVEDTIEESRKINEEVAKRVEDTIKRLEDILRDVARRVK

SEQ ID NO: 24197 - protein, 60 aa, Artificial Sequence
  Synthetic
SLREKVDKVVEEIKRKLDKLLEDSERVVEKSERDLRRWLKEAEEVVREIEKTLKELEKRA

SEQ ID NO: 24198 - protein, 59 aa, Artificial Sequence
  Synthetic
KDVVEDLIRELEEIVRRVAEEVRTTIEDLRKINDEVREKVKRLIEELKKILDDVAEEVR

SEQ ID NO: 24199 - protein, 60 aa, Artificial Sequence
  Synthetic
SLEEKAREVVKEIRRRLDELLRKSHDVVREIEERLDKLEKESEDAVREIEKRLDELAKRI

SEQ ID NO: 24200 - protein, 59 aa, Artificial Sequence
  Synthetic
AKVVEKLIKELRDILREVAERVERTIRRLREIVKRVERKVERSIEEMERIVREAEEETR

SEQ ID NO: 24201 - protein, 60 aa, Artificial Sequence
  Synthetic
SLREKVDEVVKRIEKRLEELIRKSRKANEDIRKKLEELIKKSEDVVRKIKRELEELKRRV

SEQ ID NO: 24202 - protein, 59 aa, Artificial Sequence
  Synthetic
REVVEDLIRELEEILRKVAEEVEDTIRRLEKILKEVAERVERTIKDLEDIVRDVAEKVK

SEQ ID NO: 24203 - protein, 60 aa, Artificial Sequence
  Synthetic
SLREKVKRMVEEVKRELDELEKESNRAVERVERELEKLIRKSERVNERIRERLKELAARS

SEQ ID NO: 24204 - protein, 59 aa, Artificial Sequence
  Synthetic
DKVVEKLIKEVRDIVKKVAEEVKKTIEDVERKVKEVAERVEDTIRRLDEAVKEVEERVR

SEQ ID NO: 24205 - protein, 60 aa, Artificial Sequence
  Synthetic
SLREEAERVIREVREDLDRLRRESKKVNDRIRRTLDELRKRSDDAVRDIKEKLKELAKRT

SEQ ID NO: 24206 - protein, 59 aa, Artificial Sequence
  Synthetic
KDVVRELAERLKRLLEEVEKRVKDTIRELEKIVEEVRKRVEDTIRRLEEVLDKVAKEVT

SEQ ID NO: 24207 - protein, 61 aa, Artificial Sequence
  Synthetic
SIEEELKKVLKEIEDRVRKSDKENKEASERIKRTVEELERRLREVLRRIEEAVRKLVREKG

SEQ ID NO: 24208 - protein, 59 aa, Artificial Sequence
  Synthetic
EKKVKEVVDELRKLLRELEKLSEESNRKLKKLTDDIEKLVRDVEKELRKLLKELAEKIK

SEQ ID NO: 24209 - protein, 60 aa, Artificial Sequence
  Synthetic
SVEERLKRVLERAREEIKRLLDELERVLEESRKEIKKLSEDLTRANEDTRREIEKLAREI

SEQ ID NO: 24210 - protein, 59 aa, Artificial Sequence
  Synthetic
ERIVKKVEEEIEELVRRVEKRVREVKKRMEDSNREVRKANEEVKKRSEDLLRKVRRDAE

SEQ ID NO: 24211 - protein, 60 aa, Artificial Sequence
  Synthetic
RVRDELREVLRKAREDIKRLSDKMREVLRESEEKIKRLSDDLRRVNEETKKEIDRLRKEI

SEQ ID NO: 24212 - protein, 59 aa, Artificial Sequence
  Synthetic
KEIFRKVEKEIEDLLEEVRDVNRKIEEEARRSNEDVERVNREIKKRSEELLRDVEKKTE

SEQ ID NO: 24213 - protein, 60 aa, Artificial Sequence
  Synthetic
SVREELKKALDRVRESIRRLSEELREVLERSEDTIRRLVEDLERVNEETRREIEDLARKI

SEQ ID NO: 24214 - protein, 59 aa, Artificial Sequence
  Synthetic
ERIMKEIEKRIEDLEREVKEVNREVIERAEESNRRVEELVREAKKRSRELLKRVREEAK

SEQ ID NO: 24215 - protein, 60 aa, Artificial Sequence
  Synthetic
SVREDLERALRRAAEEIEKLSRDLKRVLEESRKNIERLRRDIERMNEETEKEIRRLAREI

SEQ ID NO: 24216 - protein, 59 aa, Artificial Sequence
  Synthetic
EEDAEEIKTRIKELIDRVRRVNEEVKERMKKSNEEVEEVVRRVKEESKRLLERVEEDVR

SEQ ID NO: 24217 - protein, 60 aa, Artificial Sequence
  Synthetic
SLREDLRRVLERARDELRKLSKELKEVLKRSRDNIRKLSEDVKRANERTEEEIRRLTKEI

SEQ ID NO: 24218 - protein, 59 aa, Artificial Sequence
  Synthetic
DEIFKRVKKEIKELVDRVREVNKDVIRRMKKSNDEVKRENEKVIRESEKLLKDVEDARR

SEQ ID NO: 24219 - protein, 60 aa, Artificial Sequence
  Synthetic
SVRERLEKVLKEVEDSIKELSDDLRRVNKRTEEEIRRLAEDLERVLERIEREIRKLAKEI

SEQ ID NO: 24220 - protein, 59 aa, Artificial Sequence
  Synthetic
EEIAERVERTIRKLEDDVRKVNEDVKRRSRELLERVARLVERVKEEAEKLLEDVKRKAD

SEQ ID NO: 24221 - protein, 60 aa, Artificial Sequence
  Synthetic
SLREDLERVLEEIERELKELSDDLRRMNEETEREIRKLSDDLRRALEKIRDEIRKLAEEI

SEQ ID NO: 24222 - protein, 59 aa, Artificial Sequence
  Synthetic
EEIFRKVKEEARRLVREVEEVNKEVKKRSRDLLREVRKVNEDVKREIERLLRKVAKDAE

SEQ ID NO: 24223 - protein, 60 aa, Artificial Sequence
  Synthetic
SMREDLRRVLEEAEKKIRKLSKEAKDANRETEKEIRKLSEDVKRVNKESKDEIDRLAEEI

SEQ ID NO: 24224 - protein, 59 aa, Artificial Sequence
  Synthetic
KEIAEKVKREIEKLVRDVERVNREIIERSEKLLREVREENERVKRESRRLLKEVEKAAE

SEQ ID NO: 24225 - protein, 60 aa, Artificial Sequence
  Synthetic
SVRETLKKVLEDVRRELKKLSDKLRKVLEDSRRNVKRASDKLREVLKRVKEEIERLRREI

SEQ ID NO: 24226 - protein, 59 aa, Artificial Sequence
  Synthetic
EEIAKRIIEEIKKLLDRVREVNEDVIRRMKKSNEDLDRRNEEVRKRIEDLLEKVARDAK

SEQ ID NO: 24227 - protein, 60 aa, Artificial Sequence
  Synthetic
SLEETAKEVIERSEDHLRRLEETNRKVVEDSERHLDDLTRRIKKVVEDIKKRLDEIEKRG

SEQ ID NO: 24228 - protein, 60 aa, Artificial Sequence
  Synthetic
AEELLRTVVKEIEDANRRVEEVSRKNTEDIKEWNKRLEEELRRVVERARRELKKVEDAAR

SEQ ID NO: 24229 - protein, 59 aa, Artificial Sequence
  Synthetic
SLEETAKRVIEESRKHLDRLRRENERVVKEIRDALRELEKKVEDVVRRIAEELERIRKE

SEQ ID NO: 24230 - protein, 62 aa, Artificial Sequence
  Synthetic
EEAEDLLRKVIEDIKELNRELERVSRKNIEDLRRWLEEVREMVKRVEEKAKRVLEELREAAK

SEQ ID NO: 24231 - protein, 60 aa, Artificial Sequence
  Synthetic
SLEETIEKVVERSKRNLEKLRREIRKVVKESDENLKDVERRAREVVEEIKKALEDIRRKG

SEQ ID NO: 24232 - protein, 62 aa, Artificial Sequence
  Synthetic
EEAEELLRKVIKESEDLNRRLREEVKKVVREIEEANKRVNDTVRKMEEALKKLLDDLREKAR

SEQ ID NO: 24233 - protein, 60 aa, Artificial Sequence
  Synthetic
SLEEDMKRVVDESRRNLERVEKENRDVVKESRDNLKKVEDDIRKVVKDIRDELEKIRKRG

SEQ ID NO: 24234 - protein, 62 aa, Artificial Sequence
  Synthetic
EEAEELVRRVKETSKRVNEELDKTAKKNVDDIKDWNRRVNEKVKKVKEDAERVLRELEETAR

SEQ ID NO: 24235 - protein, 59 aa, Artificial Sequence
  Synthetic
SLEETITKVVEESKKNIDRLLEEVRKVVEDSRRDLDRVIDEARKVVEKIDRELKRIEKR

SEQ ID NO: 24236 - protein, 62 aa, Artificial Sequence
  Synthetic
EEAEELVRRVKKRSEDVNKKLDEDVEEMKRRSEKLNKDINKDVDRVRKRLEEVLKRLREAAK

SEQ ID NO: 24237 - protein, 60 aa, Artificial Sequence
  Synthetic
SLKDEIKKVVDDSRRNLEEVKKEITRVVKESRERLEELERDIERLVEKVTRELDRIEEEG

SEQ ID NO: 24238 - protein, 62 aa, Artificial Sequence
  Synthetic
EEAKELVEEVIRRSREVNRDLNRRVREVEKESRDANERVKRRVEEVKRRAREVLERLKKAAE

SEQ ID NO: 24239 - protein, 60 aa, Artificial Sequence
  Synthetic
SLEEDAKRMVDTNEDRVREWERKIDKVVKDSEKRLRELREDAERMVREIKKELEKIRTEG

SEQ ID NO: 24240 - protein, 60 aa, Artificial Sequence
  Synthetic
AEELVRRLKKASEDSNEKVARLIEEVIKRSKDVNDDLERDLREVKKRLKDVLKRLKEKAK

SEQ ID NO: 24241 - protein, 60 aa, Artificial Sequence
  Synthetic
SLEEDAKRAVEESKRTLRELEEENKKVVEDIRRALRRLEEDIKRVVEEIRRELDRIRREG

SEQ ID NO: 24242 - protein, 60 aa, Artificial Sequence
  Synthetic
AEELVRRVKKTIEDVNRKVAKVVKENIKRLREWLKRVEERLKEVKDRLRKVLEDVERAAK

SEQ ID NO: 24243 - protein, 59 aa, Artificial Sequence
  Synthetic
DVEEDVKRVADDNRRELERWRRDVKKVADEVKDRSRKLERDVERRIREIEKTLEDLRRE

SEQ ID NO: 24244 - protein, 59 aa, Artificial Sequence
  Synthetic
KEVVKRLKEESKKSNEDVARRVEKLKEELERSTREVERAVRELKKELDEVVREVKERAK

SEQ ID NO: 24245 - protein, 60 aa, Artificial Sequence
  Synthetic
SIEERLDKLLRDVKRALEELEERIRRSNKRLREAVEKLKKEVEDSNRELDKAVKEVLRRK

SEQ ID NO: 24246 - protein, 59 aa, Artificial Sequence
  Synthetic
EEAVRTAADLLRRVLERVKRLAEELHRHNKEVLDEARKIARDLHRLNEEVLRRVEEATK

SEQ ID NO: 24247 - protein, 60 aa, Artificial Sequence
  Synthetic
SIEEDLKRLLDEVRKRSKDLKEEVKRSNDRVREDLKRLKEEIDRLLEEARRRLEEIIRRK

SEQ ID NO: 24248 - protein, 59 aa, Artificial Sequence
  Synthetic
KELVDRARDKIRESLRRSEKIIEELHEHNKDALRRVREEIKRLKDKLKKVVEEVERATR

SEQ ID NO: 24249 - protein, 57 aa, Artificial Sequence
  Synthetic
DSVERVKEESERTNREIAKLSKKVEDETRKVLKDLEDISRDTERRSREVLERARRDK

SEQ ID NO: 24250 - protein, 58 aa, Artificial Sequence
  Synthetic
ELVRELEEVVRENEERVRRLIERNKKLVDDARKRVEELVRRNDKIVKEIEKVVRDIKT

SEQ ID NO: 24251 - protein, 57 aa, Artificial Sequence
  Synthetic
KSDEEVEKLIREVLKRIEELSREAEKLTDEVRKLLKEISDRVEERSRDVLDKIRRTN

SEQ ID NO: 24252 - protein, 58 aa, Artificial Sequence
  Synthetic
ELVRKLEKLLEDAERRVRELVKRNKEVVERVKRTVDELKARNKKIVEEIKKVMEEITR

SEQ ID NO: 24253 - protein, 57 aa, Artificial Sequence
  Synthetic
RELEEVEKKVRTVLEEVRRISEKAEELSRRVLEEARKISEDNEREVRRVVEDVRREN

SEQ ID NO: 24254 - protein, 58 aa, Artificial Sequence
  Synthetic
DLVERLKELVKKVEDEVRRLVKRNKDIVDDIRRRVEELVRRNKRITDEVRKEADKLRR

SEQ ID NO: 24255 - protein, 60 aa, Artificial Sequence
  Synthetic
SELEKVKKEIRELLEEVRKISKESEDRSRKSNDELHKSSEEVEKRIRDLLRELEKIVREL

SEQ ID NO: 24256 - protein, 59 aa, Artificial Sequence
  Synthetic
KDVVKELREVLERAEREARKLIKRNDEILKESEKNARDLIRRTEELLRRAKKRVDELKK

SEQ ID NO: 24257 - protein, 60 aa, Artificial Sequence
  Synthetic
SDVEEVKKEIARLLEELKRTTDKVKEDSDRSNEEVHRSSEKVKKDIEKLLDELRKVVEEL

SEQ ID NO: 24258 - protein, 59 aa, Artificial Sequence
  Synthetic
REVVKELEDVLKRAEEVVERLEEKTRRILEESRKNIERLKRETEEMLKRAEDEVKKLKD

SEQ ID NO: 24259 - protein, 60 aa, Artificial Sequence
  Synthetic
SLVDRVRELIERLLRRLEEIVREVEERLRRSNERLHESSADVERLIRELLERLRDIVRKL

SEQ ID NO: 24260 - protein, 59 aa, Artificial Sequence
  Synthetic
EDVVRELEELLRRAKERVDELKKRLEELLKESREDVERLKKKTDEALKRAEEEVEKLRK

SEQ ID NO: 24261 - protein, 61 aa, Artificial Sequence
  Synthetic
RDLEEVKKRIDELLKRVRETTKRVEDELRRSNKELHESSRRVEEEIKKLLEELEDVFRKVK

SEQ ID NO: 24262 - protein, 59 aa, Artificial Sequence
  Synthetic
EELVRTLEDMLRRAREEIEKLKEKTRKLLEDSERDVKRLIERTTEVLKRARERVEELKK

SEQ ID NO: 24263 - protein, 61 aa, Artificial Sequence
  Synthetic
SELEEVKKRIDDLLKRLRDIVDTVRKELRKSDKELHDSSKRVEEEIKKLLEELRRIVETLK

SEQ ID NO: 24264 - protein, 59 aa, Artificial Sequence
  Synthetic
REVVETLRRVLKRAEDDVRRLLEELRELLERSKRNVERLIERTKELLKRAEDEVKKLED

SEQ ID NO: 24265 - protein, 61 aa, Artificial Sequence
  Synthetic
SLLEKVEEEVRRLLKRLRDIVEEVRRLLEESNERAHRSSKKVKEDIDELLKELEDVVRRVK

SEQ ID NO: 24266 - protein, 59 aa, Artificial Sequence
  Synthetic
KDLVKTLEDILERAEREVKKLEDRLRKLLEDSKRNAEELIKRTEDVLEEALRRVEELKK

SEQ ID NO: 24267 - protein, 59 aa, Artificial Sequence
  Synthetic
SEAERVREILKDAEKKIRDILRRLREINRESARRIEDIKRKLDEILKRNEDDVRRLEKD

SEQ ID NO: 24268 - protein, 56 aa, Artificial Sequence
  Synthetic
VEDAERTVRELIKRVEEALERAERASRELIKTVEKVLEEVERRNRKSNEELKEATR

SEQ ID NO: 24269 - protein, 60 aa, Artificial Sequence
  Synthetic
SLEEEAKELVKRVRDELRKIERTIEKIVEDSRRRLEENRKRNKELIERVEKELRELKKRV

SEQ ID NO: 24270 - protein, 60 aa, Artificial Sequence
  Synthetic
ARDILREAKKMLEKVLRDLRRVLEELRKENEKVLRELEEISKETEDRLREVLRELRERTR

SEQ ID NO: 24271 - protein, 57 aa, Artificial Sequence
  Synthetic
SVEDEVREVAKKIRRILEKLKRELDRHSKKIEDILEEIRDKNEKAKEEIEEVLRRRL

SEQ ID NO: 24272 - protein, 59 aa, Artificial Sequence
  Synthetic
KEDVERVKRELEKVLRELAEEVRESLERVSEVAERLKRENDEVNDRLKKMLEDLLRKAT

SEQ ID NO: 24273 - protein, 56 aa, Artificial Sequence
  Synthetic
DEVEEVIRRVEESNKRVNEENDRVVRESKEIVRKVEEDNRRAIKESEEMLDRVAKD

SEQ ID NO: 24274 - protein, 56 aa, Artificial Sequence
  Synthetic
EEDLRRVVDKSRKNVEEVERKNRDVLRRIDKRAKELEDRNREVLKKIEKTIRDLEK

SEQ ID NO: 24275 - protein, 56 aa, Artificial Sequence
  Synthetic
SEVDEVIRRVEKSNKDVNDENKRVIDRSKELNREVNERNKEAIKRSRDLADEVRRD

SEQ ID NO: 24276 - protein, 56 aa, Artificial Sequence
  Synthetic
EERLREVVKRSEDNVRKVEEDNRRVLEESTRNVKEVKERNEKVLEEIRKTLEDLER

SEQ ID NO: 24277 - protein, 56 aa, Artificial Sequence
  Synthetic
SEVDKVRKELEDMAREIEKRAEDVIREIKRSNEEVNRTNEKVIRDSERMLEKAERD

SEQ ID NO: 24278 - protein, 56 aa, Artificial Sequence
  Synthetic
EERLDRVREKLERIVREIEDRLRKVLEDSRRNVEEVRRRNEEAVKKIRRILEELER

SEQ ID NO: 24279 - protein, 56 aa, Artificial Sequence
  Synthetic
DEVDDVIRDVDRTNEEVERENRRVIEEVRKSNEEVNKKNADAEKRSREMAERAAED

SEQ ID NO: 24280 - protein, 56 aa, Artificial Sequence
  Synthetic
KEKLDRVLERSKKTVEELEKRNREALDRSRRNVEEVEKRNREVVKEIAERVRRLKK

SEQ ID NO: 24281 - protein, 56 aa, Artificial Sequence
  Synthetic
SEVDKVVEDVKRMLKEVEDRNEKVIRDVEKMLREVEEKNKRVIEDSERVAKEAADD

SEQ ID NO: 24282 - protein, 56 aa, Artificial Sequence
  Synthetic
KEKLDKVLEEIREIVKRLEDRNREALRRIKEIVDRLEKRNRKVVEDVERIVREIER

SEQ ID NO: 24283 - protein, 56 aa, Artificial Sequence
  Synthetic
SEVDEVIKRIEETNRRVEEMNKDAIRRVKESNKRVEERNKEVIERSKKLIDDVRRD

SEQ ID NO: 24284 - protein, 56 aa, Artificial Sequence
  Synthetic
EERLRKVLKDSERTVKELEKRNRRVLEESDKEVKRLEKENRDVVDEIRERAKEIER

SEQ ID NO: 24285 - protein, 56 aa, Artificial Sequence
  Synthetic
SEVDKVITELEKMLRRVKEENKRVIDESRRALEEVEKRNREVIERSDEMARRAAED

SEQ ID NO: 24286 - protein, 56 aa, Artificial Sequence
  Synthetic
EERLREVLERIARRVRELEERNKKVVKEIEERVRELERRNREVVKKIEEKVKRLET

SEQ ID NO: 24287 - protein, 56 aa, Artificial Sequence
  Synthetic
DEVRKVIKELRDELRRVEELNKEVIDRSRKLVEDIARESKEVIERSRKLLDDVRKD

SEQ ID NO: 24288 - protein, 56 aa, Artificial Sequence
  Synthetic
REDLERALKEIEETIRRLEKRNRDVLKEIEDEARRLEEENRKVLKEARKIVEDIKT

SEQ ID NO: 24289 - protein, 56 aa, Artificial Sequence
  Synthetic
SEVDDVTRKLERILEELTETSERVVRTSRRVAEELEKRSKEAVERSRKLAEEVARD

SEQ ID NO: 24290 - protein, 56 aa, Artificial Sequence
  Synthetic
REKLERVLEEIRRRIEELSEKNRKVVKDIREIVRKLTERDEKVVREIKKIVDDIET

SEQ ID NO: 24291 - protein, 56 aa, Artificial Sequence
  Synthetic
SEVDEVTREVEELIREVEKLSEDVIRTSKELAKRAEKLSREVIKRSEELIDEVRRD

SEQ ID NO: 24292 - protein, 56 aa, Artificial Sequence
  Synthetic
KKKLEDVLREIAKKVREIEERDRKVVEEIREILKRLEDENREVLKKIRRIAEEIRR

SEQ ID NO: 24293 - protein, 56 aa, Artificial Sequence
  Synthetic
DEVRKVIKELEDRLREVEKKSKDAIDTSREMLKRVDDENKDVKRRAEEILKRVDED

SEQ ID NO: 24294 - protein, 56 aa, Artificial Sequence
  Synthetic
EEELRKLLEDIREKVERIVKRDEDVVREIEEEARRLADENRKVLEEIERIIRELER

SEQ ID NO: 24295 - protein, 56 aa, Artificial Sequence
  Synthetic
REVDEVTRRIKELNDELERRVRRAKERIEELNKRVNREDEEIVDRVRKLNDELAKD

SEQ ID NO: 24296 - protein, 59 aa, Artificial Sequence
  Synthetic
EDVKRKLKEVVDESRRTVDEIRRELERVVEKSRKNIEEVKKHTREVLKRSEETARELKK

SEQ ID NO: 24297 - protein, 56 aa, Artificial Sequence
  Synthetic
SEVDRVLEEIRKLNEDLNRRVDDATRKIRDLNRKLNEDVKKVTEDIKKLNEDLRKD

SEQ ID NO: 24298 - protein, 59 aa, Artificial Sequence
  Synthetic
EEVKRKLEKLVRESERNVREVKKKLDEVRKESKTNADKVREELKRVVEESERTVRELEK

SEQ ID NO: 24299 - protein, 56 aa, Artificial Sequence
  Synthetic
SEVDEVEKDIERLLEELRERVKRVTDEIRKLNKELNETDTDIVRKIRELLERLERD

SEQ ID NO: 24300 - protein, 59 aa, Artificial Sequence
  Synthetic
EEVKRRLEEVLRKVKRELDRIRDELRRVVEESETNVRDVRRHTEEVVKEVEDEVRRLEK

SEQ ID NO: 24301 - protein, 56 aa, Artificial Sequence
  Synthetic
SEVEELERRIRELLRRVKRIDEEIVRRIRELNKELNRRDERIVETVRELVERVARD

SEQ ID NO: 24302 - protein, 59 aa, Artificial Sequence
  Synthetic
EEVKKRLEDVLRRVREEIERLKKHTDDVLRESEKNAEDVKKHTDDVVREIEERIRELKK

SEQ ID NO: 24303 - protein, 56 aa, Artificial Sequence
  Synthetic
SEVEEVIKEIEKLNEDVNRIDKEIVKRIRDLNREVNERDKEIVKEIKRLVEEVRKD

SEQ ID NO: 24304 - protein, 59 aa, Artificial Sequence
  Synthetic
EEVKDRLRKVLESSSDNVRRVTEHTDKVLEESRKNIEDVKKHTDEVVKEIEKEVRELKK

SEQ ID NO: 24305 - protein, 56 aa, Artificial Sequence
  Synthetic
DEVKEVIRRAEKLNEKINDILRRVEEEIRRTLDEVRRRDEKIVKEIRDLMRELSED

SEQ ID NO: 24306 - protein, 59 aa, Artificial Sequence
  Synthetic
EEVKRELEEVVKESEKNIREVTDRLRKVLEESTKIVEELEEHTKRVVDEIRKRADELRR

SEQ ID NO: 24307 - protein, 60 aa, Artificial Sequence
  Synthetic
SLEEEIDRVLDEIRRIIEEIKKHTTEVLEESKRNIEEVKKHTDEVNEKSRRDIEKIKREV

SEQ ID NO: 24308 - protein, 59 aa, Artificial Sequence
  Synthetic
KEKVRKVIEEIKKIAEDVARRDKEMVDRSREINKKVNEEDKKIVEDSKRIIEDVKRKTD

SEQ ID NO: 24309 - protein, 60 aa, Artificial Sequence
  Synthetic
SLEKEIKDALDRIKKDIEDSARRTKEVNDKSKEIIDRLKKHTDDVNDESRRRIKEIKDEV

SEQ ID NO: 24310 - protein, 59 aa, Artificial Sequence
  Synthetic
KRLVKEVIDRLDEIVEDVKRRDEEIIRTSEKLLRDVARLDEEIAKRSRDLLRDVERKVK

SEQ ID NO: 24311 - protein, 60 aa, Artificial Sequence
  Synthetic
SLEERLKKVLKEVDERIREIKKHTDKVNEESRDKIRKLKEELDRVNRESEEEARKIKSEV

SEQ ID NO: 24312 - protein, 59 aa, Artificial Sequence
  Synthetic
DKDVRDVEEEIRKLLDEVRKLDEEMVERSKKLARTVERLVKEVIRESKEIIRKVKEETD

SEQ ID NO: 24313 - protein, 60 aa, Artificial Sequence
  Synthetic
SLEEEIERVLRKVEKEIRKIKERLDEMLKEIRERIERSKRRTDKVNEDSRRRIEEIKRRV

SEQ ID NO: 24314 - protein, 59 aa, Artificial Sequence
  Synthetic
KEDVKKVKKDIDKLLKEVREEVKEAEDRIRRIAEEVDKEDKRMIETSRRIIRKVDEDVR

SEQ ID NO: 24315 - protein, 60 aa, Artificial Sequence
  Synthetic
RIEDKLRKVLEEVERIIREIRKRLEDANDDSRREIEESKEDTDRVLEEIRRRIEEIKREV

SEQ ID NO: 24316 - protein, 59 aa, Artificial Sequence
  Synthetic
DEDVERVLRKIKELLRRVEEEVERVIRESKKLLDEVRKEDEEIKKTLRDIVREVARKVK

SEQ ID NO: 24317 - protein, 60 aa, Artificial Sequence
  Synthetic
SLEETVEKALKDSKDNIKRLKERVDRVLEESRRTIEELRDRARRVREEVKKRLDELRRRG

SEQ ID NO: 24318 - protein, 59 aa, Artificial Sequence
  Synthetic
KDAVKKLIDDVRKINKELNDTVEKLARDVEEINKEVARRVEKLVRELEKIDEDVTRREK

SEQ ID NO: 24319 - protein, 59 aa, Artificial Sequence
  Synthetic
SLEEKVREVLKRSEDNIRKLEDESRKVLEDSERNLRKLKKEVDDAADRVRRKIKELRER

SEQ ID NO: 24320 - protein, 59 aa, Artificial Sequence
  Synthetic
ARIVDKLIREVEKINRDVNEKVRTSIEDLKRINEELNERVERLIREVERILKEVEDRAR

SEQ ID NO: 24321 - protein, 60 aa, Artificial Sequence
  Synthetic
SLDERVERALEKSEENLRRLKKRSEEVLEEVKEAIKELKRRSREALEDVRRVLDELRKDG

SEQ ID NO: 24322 - protein, 59 aa, Artificial Sequence
  Synthetic
AKVVEELIKRVEEINTRLNEKVKKSIDDVRRIIEEVRRRVEKTIRDVERIKEEVERRRR

SEQ ID NO: 24323 - protein, 60 aa, Artificial Sequence
  Synthetic
RLEDEVRKMEKEVREEVKRLEDESRKVLEESRRNLDKLREESKRVLDTVRERIKDLRRRG

SEQ ID NO: 24324 - protein, 59 aa, Artificial Sequence
  Synthetic
AKVVKELIDRVRKILEDVEREVKKSIEEVKEINRRLNEEVKKTIEEVKEIVKEVTERAK

SEQ ID NO: 24325 - protein, 60 aa, Artificial Sequence
  Synthetic
SLEDEVRDMDRKVDEALKRLRDESKKVHDDNKREIDKLRKESEDVHRENKETLDRLRERG

SEQ ID NO: 24326 - protein, 59 aa, Artificial Sequence
  Synthetic
KDAVRELKRDVERIIKEVDELVKRSIEESRRITEEVARRVKETIDRSRKITKELRDRAD

SEQ ID NO: 24327 - protein, 60 aa, Artificial Sequence
  Synthetic
SEIEELEERLERSTRDVEKKVRDTIRESERSTEEVARRVDESIKRLERVVEEVEERVRRI

SEQ ID NO: 24328 - protein, 59 aa, Artificial Sequence
  Synthetic
EEIRKRVEDVAKKVKEDTDKLRDDSRKVHERNEEESRRLEEKSERVLRRVEEILKEIER

SEQ ID NO: 24329 - protein, 60 aa, Artificial Sequence
  Synthetic
SEVDRLITELRRSTKRVEEEVRRLIEDSKRSTREVAERVKESIRRVEKVVEEVKRRVDRI

SEQ ID NO: 24330 - protein, 59 aa, Artificial Sequence
  Synthetic
EDIRRKIEEVVKEVKEETDRLREEAEKVVRENRKASEKLRRESEEVVERVKKKVDDTET

SEQ ID NO: 24331 - protein, 60 aa, Artificial Sequence
  Synthetic
REVEEIIKELRKSTTDVAETVERLIKRSRESTKEVADRVKRLIDEVRRVVEDVERKVRRI

SEQ ID NO: 24332 - protein, 59 aa, Artificial Sequence
  Synthetic
ERIEKEIEDVVREMEERTKRLEKRAEEVNEENKRRSDELRKRIKKAVDEVEKRLDEIRN

SEQ ID NO: 24333 - protein, 60 aa, Artificial Sequence
  Synthetic
SEVEDLIKKLEESTEEVDRRVKKLIEDSRRSTEDVDRKVKELIKDVRRVIREVEERVARI

SEQ ID NO: 24334 - protein, 59 aa, Artificial Sequence
  Synthetic
DRIRETVERVFRKVERKTRELREEIREVDERNRRDSKRLRDEVERVARELEKKLKEIDE

SEQ ID NO: 24335 - protein, 60 aa, Artificial Sequence
  Synthetic
EEVERLIRELEESTDRVAREVERLIRESRKSTEDVRRKVDKLLREVREAIKEVEERVRRT

SEQ ID NO: 24336 - protein, 59 aa, Artificial Sequence
  Synthetic
EEIKRKIDKVVEEVRRRTEELRERIERVNEENKEASERLERKLREMAKELDKKLKDIRR

SEQ ID NO: 24337 - protein, 60 aa, Artificial Sequence
  Synthetic
KDVDELITRLEESTKRVAEEVKRLIEESRRSTERVAREVRRSIEEVKRVIREVEEKVRRI

SEQ ID NO: 24338 - protein, 59 aa, Artificial Sequence
  Synthetic
KDIERKIREVVEKVERDTRRLEEEAKKVNEENEKASRDLEKESKDAADTLEKKLRDIER

SEQ ID NO: 24339 - protein, 60 aa, Artificial Sequence
  Synthetic
DEVEDLIRRLEESTKDVAKKVDDTIDESRKSTKDVAEAVKRSIDEVRRVVREVEERVRRI

SEQ ID NO: 24340 - protein, 59 aa, Artificial Sequence
  Synthetic
DRIRDEIRKVVERAKERTKELEDKSKEVNDRNRETSERLKKESEDVVREVKKELDRIRK

SEQ ID NO: 24341 - protein, 60 aa, Artificial Sequence
  Synthetic
SEIDKVETEVKKLDKELEELVKRSSEKTEKLDRELEKLLRDVVREVEKLLKEIEDLVRRR

SEQ ID NO: 24342 - protein, 59 aa, Artificial Sequence
  Synthetic
KELAERIKKVARESEETVRRLEERLERDSERSRETLRRLAEAVRRVIEKVKEILERLRT

SEQ ID NO: 24343 - protein, 60 aa, Artificial Sequence
  Synthetic
DKMEEVRRTVEKLLEDLNRLSEEVIRTSEKLLEELRRLSEEVERDTERLLKELEKMKRDG

SEQ ID NO: 24344 - protein, 56 aa, Artificial Sequence
  Synthetic
DEDIKRVLDEVKKILDDNREKNKRALDRVREEVKRLEDRNREVVRKVRKIVEDLRR

SEQ ID NO: 24345 - protein, 60 aa, Artificial Sequence
  Synthetic
RVDERLDTVLKRVEETVRENKKKNDELLERSKENIDRLKKRLDDLLDKVRREAEKLKREV

SEQ ID NO: 24346 - protein, 59 aa, Artificial Sequence
  Synthetic
EEVVKEVEERIKKLLKEVNDTSKDAERRLRETNERLNEIVKEVEKRIRELSEEVRKRVK

SEQ ID NO: 24347 - protein, 60 aa, Artificial Sequence
  Synthetic
SVDERLDEVLERVKEDMDRNRRKNDESLREDEENVRRNKKETDESVKRVEERVRELKKRV

SEQ ID NO: 24348 - protein, 59 aa, Artificial Sequence
  Synthetic
EEVVKTVEEDIKRLLKEVNKVSDEAHKRNKELNERVNRVNKEAHKRNEDLLREAERKVR

SEQ ID NO: 24349 - protein, 60 aa, Artificial Sequence
  Synthetic
DVKERLDKVLEEVKRDIERNKRRNDKLLKESKRIVEENKKKNEKSLEEVKRKADDLRTKV

SEQ ID NO: 24350 - protein, 59 aa, Artificial Sequence
  Synthetic
KEVVEKVEREIERLREEVNRVSKKAEEDVERTNRELNRVSDEAHKTNERLLEKVERDVK

SEQ ID NO: 24351 - protein, 56 aa, Artificial Sequence
  Synthetic
SSEDKARELVRTLEEALRELEREMRKVVEDSKKTLKELEERNRRLEEELEKVLERV

SEQ ID NO: 24352 - protein, 55 aa, Artificial Sequence
  Synthetic
DRVIEELKELLERLRERVERVIKKVKDLNEELRRRNDKVAKDLKRLLKELEDRTR

SEQ ID NO: 24353 - protein, 58 aa, Artificial Sequence
  Synthetic
SIEDEIRKVLTRLRRVLEEIKRSSKEVADELKRVLEEIKRSSEENNKEVEEVLKEIEK

SEQ ID NO: 24354 - protein, 58 aa, Artificial Sequence
  Synthetic
REVREVIERLERMLEELERHNRDVERDLRRVLEEAKRHNEESLRRSKELLKKVRDEIE

SEQ ID NO: 24355 - protein, 59 aa, Artificial Sequence
  Synthetic
SIEDEIRKLKEDIKRVLDKVRRDNERLKERLDKVLEDIRRSSEDNNRKLEEVLKRIRDK

SEQ ID NO: 24356 - protein, 59 aa, Artificial Sequence
  Synthetic
EERVREVIEKLKETLERLKREDKEVADRAEKLLREAEEHNKRSLDESRRVLEELDEEIR

SEQ ID NO: 24357 - protein, 59 aa, Artificial Sequence
  Synthetic
SIEDRVRRVLEELEEVLERIKDSSRRVVEEAEDVLRKLEEENRKLERDLERVLKEIEEE

SEQ ID NO: 24358 - protein, 59 aa, Artificial Sequence
  Synthetic
ERELEEVEKRLREVLRRLEKHNEDVIRDLRRLLEEAADEDRRVIKTLRDVLRELKKRIK

SEQ ID NO: 24359 - protein, 59 aa, Artificial Sequence
  Synthetic
KIEEKIRRLEEDLDRVLDEIRRNSERVTKEAEEVLERLKRENEKLKKRLEEVLEEIRRR

SEQ ID NO: 24360 - protein, 59 aa, Artificial Sequence
  Synthetic
ERRVDKVIEDLKRVLDEARRHNEDVVRKLKEALDKLREDDDRVRRDLEKKLRDLERRIE

SEQ ID NO: 24361 - protein, 59 aa, Artificial Sequence
  Synthetic
SIREKIRELEERLEEVLRRIEENSERVLREAERVLKEIKDNSKRNNEKLERALEEIRKL

SEQ ID NO: 24362 - protein, 59 aa, Artificial Sequence
  Synthetic
EREVDRVIRKLEDVLRKLEEHNRRVVERLKRLLEELKKHNEDSLRKSEEVLRKLEEDAR

SEQ ID NO: 24363 - protein, 59 aa, Artificial Sequence
  Synthetic
SIEERVRELMRDLERVLKEIREHSKRVIEEAKRVLEEIERNSERNNKELEEVLDEIRKR

SEQ ID NO: 24364 - protein, 59 aa, Artificial Sequence
  Synthetic
EKELEEVERRLRKVLEDLRRNNKEVVDRLKEVLERLKEHNRRSLDESRKVLRELKERIR

SEQ ID NO: 24365 - protein, 59 aa, Artificial Sequence
  Synthetic
SIEDRIRELEKRLEKVLREIEEHSKKVVREAEKVLREIEENSRRNNKRLEEVLDEIRKR

SEQ ID NO: 24366 - protein, 59 aa, Artificial Sequence
  Synthetic
EEDVRKVIRDLEDALRRLKEDNEDVVRRLKEVLKELRKHNKRSLDESEKVLRELRERIR

SEQ ID NO: 24367 - protein, 58 aa, Artificial Sequence
  Synthetic
SIEDEVRKLAKDLDDVLREIEENSKRVLEKLDEMLERIREHSERVVERAKRVLDEIRK

SEQ ID NO: 24368 - protein, 59 aa, Artificial Sequence
  Synthetic
ERELRTVIRKLKEVLDRLREHNKRVVEELEEALKELEKDNRKVVEDLERMLEELKREVN

SEQ ID NO: 24369 - protein, 58 aa, Artificial Sequence
  Synthetic
SIEEEIEKVKKRLEDVLREIKKHSEEVKKKAEDVLRKIEKHSRDNNRKAEEVLKDIAR

SEQ ID NO: 24370 - protein, 59 aa, Artificial Sequence
  Synthetic
EEEVRKVIEELEELLERLRRNNEEVVRDLERVLEELKRDNEKSVEDSERLLTELKREIE

SEQ ID NO: 24371 - protein, 61 aa, Artificial Sequence
  Synthetic
SVKEELDDLERKVDEDVRRIRRELDEVLKESRENVKRSKDHLDEVLRRVEEAVKRLIRERG

SEQ ID NO: 24372 - protein, 59 aa, Artificial Sequence
  Synthetic
KEKVDRAKKEIEDLLREVRKRVEDVAREIKRLNEDVNRINDKVTREIEKLLEDVDRKVK

SEQ ID NO: 24373 - protein, 61 aa, Artificial Sequence
  Synthetic
SVEDKLRELEKRVRDVHRKNEEDLDRLLRKSHEMHKRNEDELRKVLEEVRDAVRKLLKEKG

SEQ ID NO: 24374 - protein, 59 aa, Artificial Sequence
  Synthetic
DEEVERVIKRIDDLLKEVHKILREVIRRIEKSLEEVHKRVRDLVREIKELLKEVDRKAK

SEQ ID NO: 24375 - protein, 60 aa, Artificial Sequence
  Synthetic
SLEDKVRELERKSRENIKRNEEELRRAKRESEENIKRNEEELKRNKERSDRMIEKIRRET

SEQ ID NO: 24376 - protein, 59 aa, Artificial Sequence
  Synthetic
KDVVERLREALEDANRRVNERNRELIKRLKEANKKVNEENEDLLRESEEILRRVEEEVR

SEQ ID NO: 24377 - protein, 60 aa, Artificial Sequence
  Synthetic
SIEELVKDAKRRSKENADRNREKLRKVEDDSRRNIEENERRLEENEKRSREVIKELADRT

SEQ ID NO: 24378 - protein, 59 aa, Artificial Sequence
  Synthetic
EDVVEKLIRELEEINREVNKRNDDLIRELREINKKVNEENKRLMKESDDILKEVRERVR

SEQ ID NO: 24379 - protein, 60 aa, Artificial Sequence
  Synthetic
SIEDLVRELKKKVDEVAEDLRRKVREALERSRENIDRLKKHSEENLRRSEEVVDKLRKET

SEQ ID NO: 24380 - protein, 59 aa, Artificial Sequence
  Synthetic
DKVVKKLIKEVDDILREVTKLVEKLIRELEDINRKVNERNRRLAEESRKILDEVEKRVR

SEQ ID NO: 24381 - protein, 60 aa, Artificial Sequence
  Synthetic
SLDEKVEELRREVDEAIKDIKEKVKRANEESERNIRELEERVKRNLEKSKKAIEELARRV

SEQ ID NO: 24382 - protein, 59 aa, Artificial Sequence
  Synthetic
EKVVEKLRKEVKEVLKEVEDRVRKLIREVERINEEVNRRVKELLEESEKILDDVDKRVK

SEQ ID NO: 24383 - protein, 59 aa, Artificial Sequence
  Synthetic
EVEERVKELEKEVEEVLKESEDHVRKSEEDLRRALEESRKHIEDLERKLKKVLEELERK

SEQ ID NO: 24384 - protein, 59 aa, Artificial Sequence
  Synthetic
KDLLKKLEEEIRKIITENRKLNRDLHRENERIIRDVRRENKRLADELEEIIKEVRERLK

SEQ ID NO: 24385 - protein, 59 aa, Artificial Sequence
  Synthetic
SVEEKVEELEKEVRKALEDSKRHVDESEKRARDLARRSRELVRRWEEEVEKIVRELETR

SEQ ID NO: 24386 - protein, 59 aa, Artificial Sequence
  Synthetic
EDLLRKLADEIRRILEDNRDLNRRLNEKNKEVLDRLEELNKTLADELRDIIRKLEKELE

SEQ ID NO: 24387 - protein, 61 aa, Artificial Sequence
  Synthetic
KELEDVVRKIEEDLRRLEESNEKVHRENEEIIRRVDETNKKVMKEIKEMEKKVRDLVRERK

SEQ ID NO: 24388 - protein, 54 aa, Artificial Sequence
  Synthetic
EVERVIERLEKVVRDSAANVERSIRELERVVEESSKHVEDVKRELKKVVDEIRT

SEQ ID NO: 24389 - protein, 60 aa, Artificial Sequence
  Synthetic
SDLDRVREEAERVVETVRRSNKEVKKKLDRELKRLRDSNKDVVDKIKRVLEKLRELIKRR

SEQ ID NO: 24390 - protein, 54 aa, Artificial Sequence
  Synthetic
EIEEVRDKLRKVVEESSKHAEEVKRDLERVVEESTRNVDRVREDLKRVLDEIET

SEQ ID NO: 24391 - protein, 60 aa, Artificial Sequence
  Synthetic
SLRERIEELKEELRRVLEELERRHRETEKKLEEVLKELKRRHEELVRRLRKALKEIKDKL

SEQ ID NO: 24392 - protein, 59 aa, Artificial Sequence
  Synthetic
EEAIKDVERKVKKLLKELRDLSEKVRKESDDLLRRLRRESERVERETRKLEKELRDEVR

SEQ ID NO: 24393 - protein, 60 aa, Artificial Sequence
  Synthetic
SKADEVRKKVDDINKRLRETTDRVAEETKKLIEELKKSAEEVKREVDKINKDLRKLAEDG

SEQ ID NO: 24394 - protein, 56 aa, Artificial Sequence
  Synthetic
EKDVERLTRKSEKVVREIEKKNEELKRELTEVLKDDERRNKELVEDSRRVLEEIRT

SEQ ID NO: 24395 - protein, 60 aa, Artificial Sequence
  Synthetic
DKARDVARKVEELLERLRELSERVSRTSEDLNRKLKKISEDVSRTSKKLLDELRRAKEKG

SEQ ID NO: 24396 - protein, 56 aa, Artificial Sequence
  Synthetic
EEDVRRLKERVKKVMEELERRHERDKEKSRRVVEKLERDHREDLKRVKKVLEEITK

SEQ ID NO: 24397 - protein, 59 aa, Artificial Sequence
  Synthetic
SKADKVEEEVKELLKRAKALSDRVSEESRRLLKELRDSARRVEEEVKRLEEELRKLKED

SEQ ID NO: 24398 - protein, 56 aa, Artificial Sequence
  Synthetic
EEKVRRVLREVREMLKDLEKKHRDDIKRVTEVLKEDEEKNRDLMRKVDKFLEDIRK

SEQ ID NO: 24399 - protein, 59 aa, Artificial Sequence
  Synthetic
SKAEEVEELVKKLLAEVKKSLDDVRRTVEKLLREVRKSLREVEETVKRLLKRLKDLKDD

SEQ ID NO: 24400 - protein, 56 aa, Artificial Sequence
  Synthetic
EEKVEKLERDVRRALERDTRENKKLEDRVETALREDKKRNDDLREDVKRVLEEIRT

SEQ ID NO: 24401 - protein, 61 aa, Artificial Sequence
  Synthetic
DELEELIRRIEKLIRDSRKITDDVRKEIEKTIRESREINKEVHERNRKLLEEITEVVKRDG

SEQ ID NO: 24402 - protein, 56 aa, Artificial Sequence
  Synthetic
EEDLRRVDDRVRRVVEESEERLRRVYEESRKVVEESRKHLKEDLDRVKRTVEEIER

SEQ ID NO: 24403 - protein, 61 aa, Artificial Sequence
  Synthetic
SELERVEEEIKKLIRTSREINKEVAKRIEETIKESRDINKEVVDRIRELIERLREVVKRDG

SEQ ID NO: 24404 - protein, 56 aa, Artificial Sequence
  Synthetic
EKELKRVEDEVRKVVEESKDHLRKVYEKSKKVVEESKEHLDRVLREVEKEIEEIRR

SEQ ID NO: 24405 - protein, 61 aa, Artificial Sequence
  Synthetic
SELERVEEEIKRLIDESERINRKVVKEIEDTIRTSEEINREAHRRNRELIKRVEDVVRTKG

SEQ ID NO: 24406 - protein, 56 aa, Artificial Sequence
  Synthetic
EKELRRVEEEVRKVVRDSERHLDEVYKRSKEAVDRSKKHLDKDVEEIDRVVKEIER

SEQ ID NO: 24407 - protein, 61 aa, Artificial Sequence
  Synthetic
RELEEVKKEIDRLIREVEEVNKDVVRKIKETIRRSREINKRVVDEIRRLIKELDDVVKTKG

SEQ ID NO: 24408 - protein, 56 aa, Artificial Sequence
  Synthetic
ERELRKVLEKVERVVKKSRDHLDRVYEDSERVVRESEKHLDEVLERVREEIERIRK

SEQ ID NO: 24409 - protein, 61 aa, Artificial Sequence
  Synthetic
RELEEAEKTIEKLIKESRDINEKVARDIDKTIREIREEMKRVEEEIRDLIRRIREVVKRDG

SEQ ID NO: 24410 - protein, 56 aa, Artificial Sequence
  Synthetic
ERKLREVTKRVDKVLEESRRHLEEVYRKSKEVVDEIRKRLREVLKRVREDVERIER

SEQ ID NO: 24411 - protein, 61 aa, Artificial Sequence
  Synthetic
SELDEVAKRIKELIKESRRINEEVERRIKKTIDEVRKINKEAAKTVDDLIKTIRDVVRRKG

SEQ ID NO: 24412 - protein, 56 aa, Artificial Sequence
  Synthetic
EKKLRDLEEEVRRVVEESKDHLRKVYERSRKVVEESRKHLDEVLTRVDKVVKDIRT

SEQ ID NO: 24413 - protein, 60 aa, Artificial Sequence
  Synthetic
SELEEAEKKIERLIEEVRKMNKTVHEENERLIEDLRRVVKEAHERNKRLIEELEDVVRKI

SEQ ID NO: 24414 - protein, 59 aa, Artificial Sequence
  Synthetic
KDVEKKLKDVLDKVRKVVEESRRHLEESLDKVRRVAEEIRKRLKESKDRVDEAAKEIRR

SEQ ID NO: 24415 - protein, 60 aa, Artificial Sequence
  Synthetic
DELEEAEKRIKELIDRLEEFNEEVHRRNEKLIRELREVLKRVEEEIRRLIKELRDEVRKI

SEQ ID NO: 24416 - protein, 59 aa, Artificial Sequence
  Synthetic
KRVEERLERVLREVEEVVKRSRKHLEDSLREVEKAVKEIRDRLDEVLRRVEKAVEEIRT

SEQ ID NO: 24417 - protein, 60 aa, Artificial Sequence
  Synthetic
SELEDAERKVKELIDRLREVNRKVHEDNKRLIDELRDVNRKVAEEVRRLIEELKEVARRV

SEQ ID NO: 24418 - protein, 59 aa, Artificial Sequence
  Synthetic
KRVRDRLKEVEDRVRKVVEDSRRHLEKSLREVEEVIRESREHLEEVLRRVKEEADKIRK

SEQ ID NO: 24419 - protein, 60 aa, Artificial Sequence
  Synthetic
SELEKVREDIKRLIEDLRRANDRVRRESERLNRELREVNKRVHDDNRRLIEELRRLVKDI

SEQ ID NO: 24420 - protein, 59 aa, Artificial Sequence
  Synthetic
ERVRDELRKLLRTVEKVVEESKKHLKEVLDRSREVVEESKTHLEKSLTDVEKVVREIRT

SEQ ID NO: 24421 - protein, 60 aa, Artificial Sequence
  Synthetic
STLDEAVKRIDELIKRLREVNEEVARRSKRLNDELKKVNEDVARKIEELIRRLRDVVRKI

SEQ ID NO: 24422 - protein, 59 aa, Artificial Sequence
  Synthetic
KRVEEELERVLRKVEKVVKESRDHLEEVLRRSEDMARRSREHLEELLKRVEKVVREIRT

SEQ ID NO: 24423 - protein, 60 aa, Artificial Sequence
  Synthetic
SELEEAIRRIEKLIRELREVNKRVAEEVKKSNEESKEVNKRVKDDVKELIERLRDIVKKV

SEQ ID NO: 24424 - protein, 59 aa, Artificial Sequence
  Synthetic
KDVEDKLREVLRRVEKVAEESRRHLEKVARESEEVVKRSRKHLEEVEREVKKVIDEIRK

SEQ ID NO: 24425 - protein, 60 aa, Artificial Sequence
  Synthetic
RTLEEVEKEVEKLIEDLRRVNREVAERIKKSNEDSKRVVERVEDEIRRLIEELKDMVRKV

SEQ ID NO: 24426 - protein, 59 aa, Artificial Sequence
  Synthetic
ERVDKRLRDVLRKVKKVAEESRKHLEELAERSKEVVERIRRRLEEVLKRVREEAEKIRK

SEQ ID NO: 24427 - protein, 60 aa, Artificial Sequence
  Synthetic
SELEDAERRIERLIRELRKANEEVARRIEKSNEDSRRVNKKVAEEIERLIKELRDVTKDV

SEQ ID NO: 24428 - protein, 59 aa, Artificial Sequence
  Synthetic
KRVEEELKRVLDEVKRVIEESKERLKKWLRDSERVVEESRRHLEELRKRVEKAVREIRT

SEQ ID NO: 24429 - protein, 59 aa, Artificial Sequence
  Synthetic
RVEDEVRKMREKSEKVDREIREAVRRSLTRIKEVVDEIRDEVRRSEDKVKKEIDRLRKE

SEQ ID NO: 24430 - protein, 62 aa, Artificial Sequence
  Synthetic
EEVDKLLDEVRREADESNTRLRERVKEVNKRNEEVIEELRKRVEEVHRTNEDLIRELRKKTT

SEQ ID NO: 24431 - protein, 59 aa, Artificial Sequence
  Synthetic
REEEELERVKRRSEKVDEEIKKRLREVAEEVKRSNEEVKKRLEEVLRDSKRKLDELREE

SEQ ID NO: 24432 - protein, 56 aa, Artificial Sequence
  Synthetic
VRELIRELEESNKRVKDVLRKLIEEVKKSDDELREIVKRLVEEVERSNKELEDRVR

SEQ ID NO: 24433 - protein, 59 aa, Artificial Sequence
  Synthetic
REEERLKKLKEDSDRVDREIERKAEKVLEESEEVDRDIERKLREVERKSREVLEELKKR

SEQ ID NO: 24434 - protein, 56 aa, Artificial Sequence
  Synthetic
LEELRKEVEKSNTDLEKIIEDLIRRLKKSNEDVRRTVTELVKEVDRSNKKLEDEVR

SEQ ID NO: 24435 - protein, 59 aa, Artificial Sequence
  Synthetic
REEEELEKLRERSERVDDEIRKRLREALERSREVDEELRRRAEESKKESDEVIKDLARR

SEQ ID NO: 24436 - protein, 56 aa, Artificial Sequence
  Synthetic
LDELRREVEKSNEDVRRFLEKLVRDLEESNRRVRERIKRLHEENKKSNDELRKRTK

SEQ ID NO: 24437 - protein, 60 aa, Artificial Sequence
  Synthetic
SELEELKKKSKKLNDDIERVVEEVLKRSEDINERVKKEVKDVIDRNTDVLRRVKRDVERE

SEQ ID NO: 24438 - protein, 56 aa, Artificial Sequence
  Synthetic
EEAVRKVEKENRESVEKLKKAVKEVRDRNRKVIEELKDLVRRSRDKSKKVVDELRK

SEQ ID NO: 24439 - protein, 60 aa, Artificial Sequence
  Synthetic
REVDKARKDVDDILKRVTEAVDRMDRDNERVLREVEETIRKLEEDSRRINKDIEDAVRKE

SEQ ID NO: 24440 - protein, 56 aa, Artificial Sequence
  Synthetic
RKDVEDVRRKVEEVVRRMEKRLRESEKKSRDVVRKLRKVIEDVERDNDRVVKELEK

SEQ ID NO: 24441 - protein, 60 aa, Artificial Sequence
  Synthetic
SELEEMRRRIERLAEEVRTTVEEVVRRSEELNKEVEKAVRKVVDENRRVLEEVKEEVRKE

SEQ ID NO: 24442 - protein, 56 aa, Artificial Sequence
  Synthetic
KEEVKRVEERVERVVEELRRLVEEVRKRNEDSIEKLKDLVRRSKEESERVVKELED

SEQ ID NO: 24443 - protein, 60 aa, Artificial Sequence
  Synthetic
SDLERVRKESEDLNRRIKTEVRRVLEELKELLKRIKEEVEELVRRNEEVLKRVREEVTKR

SEQ ID NO: 24444 - protein, 56 aa, Artificial Sequence
  Synthetic
EEAVRKVKEDNDRSVEELKELVKDVERKLREAIKELEDLIRRSEEKSREVVERLRR

SEQ ID NO: 24445 - protein, 61 aa, Artificial Sequence
  Synthetic
SLEEEVRRVKKELRRVLEKSTKLIEEVTRELETVLRESRDRVRRAKEELKEAVREVRRDVG

SEQ ID NO: 24446 - protein, 59 aa, Artificial Sequence
  Synthetic
EEEVRKVVEDVERVLRELEKHDRDVAEEVRRVLDELRKHDEDVRRKLRKVLEELKEKIK

SEQ ID NO: 24447 - protein, 61 aa, Artificial Sequence
  Synthetic
SIEDRVRRVEKELREVERKSTETVKRVEEELEEVVRRSRELVERVKERLKKMVEEVKRDTG

SEQ ID NO: 24448 - protein, 59 aa, Artificial Sequence
  Synthetic
EKELEDVERDVRRVLKEAEDNDRRVVERVRRVLKEAEKHDRDVVRRVDEVLKRLKEEIR

SEQ ID NO: 24449 - protein, 61 aa, Artificial Sequence
  Synthetic
SIEEAVERVAKRLEEALRRSTEEVKRVKEETRESVERSRREVEKVEKELREVVERVRRERG

SEQ ID NO: 24450 - protein, 59 aa, Artificial Sequence
  Synthetic
DDRLRKVVEELETVLDELRKNDRRVIEEVRRINDELRRRDEEVIKRVRDMLKKLTEEIK

SEQ ID NO: 24451 - protein, 59 aa, Artificial Sequence
  Synthetic
SLEDKLRENKRRSEAVVEEAERRLRKNEEDSRKVVRELEDKLRRLREESKEMADRLRRK

SEQ ID NO: 24452 - protein, 59 aa, Artificial Sequence
  Synthetic
DKVVEKLLKESKEILDRARETVKRILDDSERILRELRRRVEKLIKESRDILRKVDEDER

SEQ ID NO: 24453 - protein, 59 aa, Artificial Sequence
  Synthetic
KAEEILEDIKRAVEEALRKLEESVRRNKERIREAVERLRETVKEAKERVDEVKRELEEK

SEQ ID NO: 24454 - protein, 59 aa, Artificial Sequence
  Synthetic
EEVLRKVREDLERIIRRVEEESKKSHKDSEDVLRRVEERSKKSLEELEDIIKKVKEEAD

SEQ ID NO: 24455 - protein, 60 aa, Artificial Sequence
  Synthetic
DMEKIVRDVEDRVREVEDRLRRIAERNKREIERVVEELKKTVKEIEDKVREVVKRLEEKG

SEQ ID NO: 24456 - protein, 59 aa, Artificial Sequence
  Synthetic
EEVLRKVVTDLERILRRVLEDAKRVHEESKRRLDDVRRRSEDSVRRLEEELKRVEEEVD

SEQ ID NO: 24457 - protein, 59 aa, Artificial Sequence
  Synthetic
DAEKILEDIKREVDEVLKRLRDIIRRNEEEIRRAVEDLKRIADEDREAIKRVIDELRKK

SEQ ID NO: 24458 - protein, 59 aa, Artificial Sequence
  Synthetic
EEALRKVVEELRKILRDVTEVAKKVHRDSEEVLKKVREDVRKVHEDSKRVLDKVDKDAN

SEQ ID NO: 24459 - protein, 56 aa, Artificial Sequence
  Synthetic
SRLEEVLRRHEELNERVERTVKKVHDDSKELIDRIRKDVEKVVRELEKVIDEVEKN

SEQ ID NO: 24460 - protein, 55 aa, Artificial Sequence
  Synthetic
EKVEEIERHARKVERRLEEIVDRNRKSVDKAKKELEKIVRDVRRRVEEVVDRLRK

SEQ ID NO: 24461 - protein, 56 aa, Artificial Sequence
  Synthetic
DEVRRVLEELRRLLDEVRERVRRVVEEHKRLNDRIRREVERAHEENKRVDDDLRRK

SEQ ID NO: 24462 - protein, 55 aa, Artificial Sequence
  Synthetic
KDVKEVKKEVERVKEELRRLVEELRKHAEKVKEELKRIVDRDRETNERTVEELKK

SEQ ID NO: 24463 - protein, 57 aa, Artificial Sequence
  Synthetic
SEAEDVLRKLERLLEEVRERVADAHRRSKELLDRVDKEVKRVNEENRKLDDDIRKKV

SEQ ID NO: 24464 - protein, 55 aa, Artificial Sequence
  Synthetic
DEARKVREKVKKVEEELRRIVEEDRKEVEKVKRKLEKDVREDEKENRKTVRELEQ

SEQ ID NO: 24465 - protein, 60 aa, Artificial Sequence
  Synthetic
TLEELLEEIRRKVEEVLKKLEDLLRRDHEEVKKVEEELEEINKRSEDRVRKAVRRLERDA

SEQ ID NO: 24466 - protein, 59 aa, Artificial Sequence
  Synthetic
EEAIRKVLRKLEEEAKRLEKRIEEVLKESKDRIDELRKRIEESHKDLERIIEELERRIK

SEQ ID NO: 24467 - protein, 60 aa, Artificial Sequence
  Synthetic
RLEELLERIRKRVEEVKRESERLLKEDHDRVEEAKKRSEDINRRSKEEVDRMLRELETKA

SEQ ID NO: 24468 - protein, 59 aa, Artificial Sequence
  Synthetic
EEAIRRVLKKLEEIAKRLLDENRRVLEESKKIIDKLEEDNRRSHRELKRILDELRKRIK

SEQ ID NO: 24469 - protein, 60 aa, Artificial Sequence
  Synthetic
KEAEDLEKKVEDILRRVRELLEELHRRSEKILKDVKDRSRDLLRRVREILKRVEEKKERV

SEQ ID NO: 24470 - protein, 56 aa, Artificial Sequence
  Synthetic
ERLVREVEKKLRTVEEEVRRIVKENKERLDEAREDVKRSNKTIRDELERARERIET

SEQ ID NO: 24471 - protein, 60 aa, Artificial Sequence
  Synthetic
SEAEDLTRRVREILKRVEDLSKKLNDDTKKILDELRELSKRLMEEVKKILRRVEEKKERV

SEQ ID NO: 24472 - protein, 56 aa, Artificial Sequence
  Synthetic
KRLVDTVREELERVRKKVEDSDRRNEEELRKVKEEARRSNERIRELLKTVEDRIRT

SEQ ID NO: 24473 - protein, 60 aa, Artificial Sequence
  Synthetic
DEVRKLVREVEDILRRVREKSERLVRLVEEILRRVLEESRRLLEETREILERVEEKKERV

SEQ ID NO: 24474 - protein, 56 aa, Artificial Sequence
  Synthetic
ERLVREVKELLDRVADEVRKSDEDIRRLLEDAARKVEESNKRNRDLLETVRRRIEK

SEQ ID NO: 24475 - protein, 60 aa, Artificial Sequence
  Synthetic
SEVEKLKKEVKESSKEVIKEVEKLHRESEKSSEDVKREVEKLHRRSKEVADEVRERVRRR

SEQ ID NO: 24476 - protein, 56 aa, Artificial Sequence
  Synthetic
ERVVEEIERDVRESLRRIEEIIRRNEKRVRESLEDLKRILRENKETVRKVVDELRK

SEQ ID NO: 24477 - protein, 60 aa, Artificial Sequence
  Synthetic
SEVDDLTRRVRDVLRRVEEKVRDLHRRSEKVARDVEREVEELHERSKDVARKVEEKVRRI

SEQ ID NO: 24478 - protein, 56 aa, Artificial Sequence
  Synthetic
KDVVDRIRREVEEMLRRLEDILRRNEDTVRRVKEKLKRIVKRDEEEVRKVLDRLRK

SEQ ID NO: 24479 - protein, 60 aa, Artificial Sequence
  Synthetic
SEVEELKKRVEDVAEEVKDRVRKLHEKSERSSREVEKEVRKLHEESRRVAREVTERVRRI

SEQ ID NO: 24480 - protein, 56 aa, Artificial Sequence
  Synthetic
EEVVKEIRDTVEKVLEEARKIIEDNRKRVAESVETLKDIIRRDEKTMRDVVDELRT

SEQ ID NO: 24481 - protein, 60 aa, Artificial Sequence
  Synthetic
DEVEELRREVEESSRRVEKEARRLHKRSEESSREVEERLKRLHDDSRRVAREVEEIVARS

SEQ ID NO: 24482 - protein, 56 aa, Artificial Sequence
  Synthetic
EDKVRDIKRRIDESKRKIEEIIKRDKEEAEKSEEKIKEIIERDRETVERVVRKLRE

SEQ ID NO: 24483 - protein, 60 aa, Artificial Sequence
  Synthetic
EIEEIEEELKDRVRRSEEKLRRIEKELRELVEKSRKELEDLLDKDRRDMKRVADELRRDD

SEQ ID NO: 24484 - protein, 59 aa, Artificial Sequence
  Synthetic
RRVVEELTRKLEESIKKSEDEVKKVKERLEESIRRSKERLEDARRESERVLTEIRERLR

SEQ ID NO: 24485 - protein, 60 aa, Artificial Sequence
  Synthetic
EVERILDELRRRVEEVVKENEKALDTLRKESERTEEENKRLLDEAREKVDRVVKELKRDD

SEQ ID NO: 24486 - protein, 59 aa, Artificial Sequence
  Synthetic
EKVLRDLAKKLEDVIRKSEELTKELAKRLRESSKRSIDLTRELLKRLEEVLKKVRDALR

SEQ ID NO: 24487 - protein, 60 aa, Artificial Sequence
  Synthetic
SVEEIVEEIRRRSKETEDRNRRVVEELEERVRRVLEELKKIVEDARRKVEKVARELKRDD

SEQ ID NO: 24488 - protein, 59 aa, Artificial Sequence
  Synthetic
EKVVEELLRRLKETSDDSLRRTDELRKELERVLKEVRERLKELDRELKRVLDDVREKIR

SEQ ID NO: 24489 - protein, 59 aa, Artificial Sequence
  Synthetic
KLEDILRKIEKELKEVKEKSERIVREIEKRHEDDKRRVEDIVRRIKEEVERVVKEIKEA

SEQ ID NO: 24490 - protein, 59 aa, Artificial Sequence
  Synthetic
DEVMKKVEKEVRDVIKELEDTAREVEKKSEKVLKETNDLAKEVMDKVRKVAEDLRKKLE

SEQ ID NO: 24491 - protein, 59 aa, Artificial Sequence
  Synthetic
ELEEIVRRIEEEVRRADKEVKEILTEIEKEHRRDVERSDRSLEKIKRDVDRALEEVERV

SEQ ID NO: 24492 - protein, 59 aa, Artificial Sequence
  Synthetic
REVMKKVTEEVREVLDRLRELLKEVAKRSEEVIKRTNELNETVMRDVERVLRELREELR

SEQ ID NO: 24493 - protein, 59 aa, Artificial Sequence
  Synthetic
SEVEKLEEDFREMIERSERTLEKLKKENEDASKKSKEKLEKLLREMKEIIDRIRDLIRK

SEQ ID NO: 24494 - protein, 55 aa, Artificial Sequence
  Synthetic
EEVIKKLRELLERLEREHRKVIEELKKSNKKNEEDIRRVLEELRRLVKKLADDAR

SEQ ID NO: 24495 - protein, 59 aa, Artificial Sequence
  Synthetic
REAEELLKEMKRASEKSEKIIEDLRRENEKLSKESEDIIRKLKEDNERMIRTIEELIRA

SEQ ID NO: 24496 - protein, 55 aa, Artificial Sequence
  Synthetic
EEVIKELRELLERNEREIKKVLDELRRSNEKNERDIERALEELKRTNDELAKRAK

SEQ ID NO: 24497 - protein, 59 aa, Artificial Sequence
  Synthetic
DEVEKLRREIEEIIKEWEKRTRDLKREMKKISDDSRRRIEELLRDFKRIIDELRKAIED

SEQ ID NO: 24498 - protein, 55 aa, Artificial Sequence
  Synthetic
KEVIERLRELVKRVTDKVRKVNEELRKLLEDNADEIRRAIERLRELLRRLEEEAR

SEQ ID NO: 24499 - protein, 59 aa, Artificial Sequence
  Synthetic
SEVEKLVREAEKIIEDIRRVIEELLRRARKINKEWDDVSRKLKEDAKRIIDTVLKLIRE

SEQ ID NO: 24500 - protein, 55 aa, Artificial Sequence
  Synthetic
KDVIERLRDLVRRVKEDIERVLDEWRKSSEEAEERSRRVIEELRRLLEELKERVR

SEQ ID NO: 24501 - protein, 59 aa, Artificial Sequence
  Synthetic
SELEELKKTMDEVNKETKKENDRLLDEARKVNEESRRRLEKLRKELDDVVREVEDARRR

SEQ ID NO: 24502 - protein, 59 aa, Artificial Sequence
  Synthetic
SDKVERVLRELRKSSRKVHEDSKKVVEDLERSSRTVEKELRDALKELEDKVREVEKKLK

SEQ ID NO: 24503 - protein, 60 aa, Artificial Sequence
  Synthetic
DELEKLLEEARKVNEETKEANERLLREMEKVNKESEDANRKLLEELKEVVDRVDDLARRN

SEQ ID NO: 24504 - protein, 59 aa, Artificial Sequence
  Synthetic
SEDVKRVVDELRESSREVHRRSREVVERLRRSSEEVHKKSRDVLRELTRLVREVKERLR

SEQ ID NO: 24505 - protein, 60 aa, Artificial Sequence
  Synthetic
DELETLLRELERVNKETERELERLKREAEEVNKATRKDLDELRKEIDKVVKEVEEARRRN

SEQ ID NO: 24506 - protein, 59 aa, Artificial Sequence
  Synthetic
SERVKKVVDELRDSSRRVKEKLEDVVRRLRDLSRRTKEEVEKVEEDLRRKVREVEERLR

SEQ ID NO: 24507 - protein, 60 aa, Artificial Sequence
  Synthetic
DELETLLDEAKKVNEETRRANRELRERVREVNKRTEEELKKLRDRLEKVVDDVDKLRKRN

SEQ ID NO: 24508 - protein, 59 aa, Artificial Sequence
  Synthetic
SRRVREVEERLKKLSEDTHRDSRRLVEEMRRLSKETEKKVEDVVRDLRRLVKEVEERVK

SEQ ID NO: 24509 - protein, 60 aa, Artificial Sequence
  Synthetic
DELEKLRRELEEANRRTKKANEEILREAERVDERSEEELRKILETLKKVVKDVDDMARRN

SEQ ID NO: 24510 - protein, 59 aa, Artificial Sequence
  Synthetic
DRRVRTVVEELKKLSRETHEDSKRVVEELERLSRESERKLREVVKEMRKLVKDVEDKVK

SEQ ID NO: 24511 - protein, 60 aa, Artificial Sequence
  Synthetic
DELEELLRRVEEVDKESKRRLDEIKRRMKEVNDRTREALRDLLRRLAEVVKRVLDLIRRG

SEQ ID NO: 24512 - protein, 59 aa, Artificial Sequence
  Synthetic
SERVKKVVDDARDSSRKTVERLETVVRDLKRSSDDVEREVRELLKELERLVKKVEDDAK

SEQ ID NO: 24513 - protein, 60 aa, Artificial Sequence
  Synthetic
RELEELLRKVRKLVEEIERELKKLLEEDRRLSEESREELRKLLEDARRMIREIEELLKRR

SEQ ID NO: 24514 - protein, 58 aa, Artificial Sequence
  Synthetic
EDAKRVLKEIRRLAEELKKSVKRVIEEVEDSNRRNEEEVRRVLEEIRRLLEDLDRKVK

SEQ ID NO: 24515 - protein, 60 aa, Artificial Sequence
  Synthetic
SELEELLKDAKRVIDTSRRLITELEKRDEEIIRRIKDLLRRVTEEAKRMLDEIREELKRR

SEQ ID NO: 24516 - protein, 58 aa, Artificial Sequence
  Synthetic
EKAKRVLEEIRKLLEDSKKESEDVARKLKKSNDELRRDVERVLREIEKRLEDLKREVE

SEQ ID NO: 24517 - protein, 60 aa, Artificial Sequence
  Synthetic
SELEKLLREVEKIIRDSDDLLRRLEKRNRDLIRTSEKLLKEVKDDVDRVIRELERLLEEE

SEQ ID NO: 24518 - protein, 58 aa, Artificial Sequence
  Synthetic
EKAEDVLRRIEKLLDDSRRRSEKVAKELEESNERSKRKTEKVLKEIKEALDRVREKVK

SEQ ID NO: 24519 - protein, 60 aa, Artificial Sequence
  Synthetic
SEIEKVARDVEELLKKVEKKNRDMVERVRRLLEKVKRENEELVRRVEESNERLKERVDRS

SEQ ID NO: 24520 - protein, 56 aa, Artificial Sequence
  Synthetic
VEELEKTVRKLARDAEKISEDVERRVRELARRLRKISEEVLRRNKELVRRVDEEIR

SEQ ID NO: 24521 - protein, 60 aa, Artificial Sequence
  Synthetic
SEVEEAVERVKKLLEKVRKDNEEFRERVRKSNEEAEERNRRVVEEVRRSNEELKEKVERS

SEQ ID NO: 24522 - protein, 56 aa, Artificial Sequence
  Synthetic
VEDLKRRVKELADEARRISEKVLRDNKRLLTELDKISERVLRENEKLVREVEETIR

SEQ ID NO: 24523 - protein, 60 aa, Artificial Sequence
  Synthetic
SEIEKVAREIEELLRKVAEDNRRMVERVRRLLEEVKTRNKKMVDEVKESNERLKDKVRRR

SEQ ID NO: 24524 - protein, 56 aa, Artificial Sequence
  Synthetic
VEELKRRAERLIEELRKISEEVERRVKRLVEELEEITRRIKEENDKLVREVEKELK

SEQ ID NO: 24525 - protein, 60 aa, Artificial Sequence
  Synthetic
SEVEKVVEELKDLVRKSSEKNRKVAEEVKKSNDDLRRKVEEAVREVRESNERLKREVDES

SEQ ID NO: 24526 - protein, 56 aa, Artificial Sequence
  Synthetic
VEELKDRVRKLIEESERISREILKTNRKLLKELEELLKRLLKRNRELVREVKEEIK

SEQ ID NO: 24527 - protein, 61 aa, Artificial Sequence
  Synthetic
SDIERVVKEVKDLLEEVRKDNERVMDEVRKLLEELKRKLRKVVEEVRRSNEELKKEVDRRN

SEQ ID NO: 24528 - protein, 56 aa, Artificial Sequence
  Synthetic
VETLRKEVEELADDLRRISEEVRDRVRKLVTKAEEILRRVLETNKKLLKEVKETLK

SEQ ID NO: 24529 - protein, 60 aa, Artificial Sequence
  Synthetic
SEIEKVAEEIKKLLRKVEEDNKTVVEEVRRSNEKLKRDNDKVVRDVERSNRELKEELDRS

SEQ ID NO: 24530 - protein, 56 aa, Artificial Sequence
  Synthetic
VEELKKRVEELARRAKEISDKVRDDNEKLLRELREITKRVKEENDRLLKEAKDAIK

SEQ ID NO: 24531 - protein, 60 aa, Artificial Sequence
  Synthetic
KEIEDVAKRVEELLRESSREVEEVLREVEELVRRSTRRNEEAVRRVRKSNKELEDEVRRS

SEQ ID NO: 24532 - protein, 56 aa, Artificial Sequence
  Synthetic
VKTLLDEAKRLVDRSRELLERLLRDVRRLIKESDKITRELERKNEKLLKEVKEEID

SEQ ID NO: 24533 - protein, 60 aa, Artificial Sequence
  Synthetic
SEIEDAEREVRRLLRESSERVKTVIEEVRELLRRVKRENDEAVKEVEKSNRDLEDKVRRG

SEQ ID NO: 24534 - protein, 56 aa, Artificial Sequence
  Synthetic
VEELKERVKRLVADSERLLKELRDRVKELADEARRTTEEVLRRNRELVRRIEEDIR

SEQ ID NO: 24535 - protein, 60 aa, Artificial Sequence
  Synthetic
SELDEVLKTVRKIIEENEKIVKEVLDTSRRSVEEVRKHTKEVLDRVRELAKELEDATRKT

SEQ ID NO: 24536 - protein, 58 aa, Artificial Sequence
  Synthetic
EEVDKVAEEIEKLVRESNRKVREVVKEIEKLNRDMRKESEDAVKEIEELLRTLEEKVR

SEQ ID NO: 24537 - protein, 60 aa, Artificial Sequence
  Synthetic
SELDEVLKTVEKIIRDNEEIVKEVLRRSERSIKELKKHTDDILRKARKLAEELKRVVERT

SEQ ID NO: 24538 - protein, 58 aa, Artificial Sequence
  Synthetic
KRVKDVAERIRELVEESNRKVREVVERIKDLNRKVNKTSEDAAREIEKLLEELREEVR

SEQ ID NO: 24539 - protein, 60 aa, Artificial Sequence
  Synthetic
DELEEVLKRVREIIKRNEDHSDRVREKSRESVKELEEHTERVLRDVERLARELEEMIDKT

SEQ ID NO: 24540 - protein, 58 aa, Artificial Sequence
  Synthetic
KKVDDVAREIEKLLKESNDKSRELVKEIKDLNKRLNEKSEEAVKRIEDLLRRIEERVR

SEQ ID NO: 24541 - protein, 60 aa, Artificial Sequence
  Synthetic
KELEDVLERVKEIIKRNEEILDKVRREVEESVRRAEEILKEVLERVRDLVRKLDDIKDKM

SEQ ID NO: 24542 - protein, 58 aa, Artificial Sequence
  Synthetic
EEVKRVADEIKRLADESNEKVRRVVRRIDELNKEVDRKLKEVMKEIKKELEDAERRVR

SEQ ID NO: 24543 - protein, 60 aa, Artificial Sequence
  Synthetic
DELEEVLRRVRKIIEENKEIVRRVLEDVKRSVEELERHTERVLREAKRLADELEDARRKI

SEQ ID NO: 24544 - protein, 58 aa, Artificial Sequence
  Synthetic
EEVKRVAKELRELLERSNREVRRVVEEIKKLNDEVRKKSEEMRRRIEKLLEELERKVK

SEQ ID NO: 24545 - protein, 60 aa, Artificial Sequence
  Synthetic
SDLEEVLRRAEKLIEDLERIVRKVLEDSDRSIDEVRRHTEKVLRDVRKLAEELKDIARKT

SEQ ID NO: 24546 - protein, 58 aa, Artificial Sequence
  Synthetic
EEVKRVIDEIRDRLRKAEERVRKVIEDIKRKNKKLREDSEKAEREIDELLRKVEEDVK

SEQ ID NO: 24547 - protein, 60 aa, Artificial Sequence
  Synthetic
SELEEVLERVKDLLKKLKEHSDRVLEESKESIDRVRKHTEEVLRTARELIERLDEMRKRT

SEQ ID NO: 24548 - protein, 58 aa, Artificial Sequence
  Synthetic
EEVKDVAREIRRRLDELRKDSERVAEEIRRLNKKLRDESRKAIKEIEELLRRVTKKVE

SEQ ID NO: 24549 - protein, 60 aa, Artificial Sequence
  Synthetic
DELEEVLERVRKLIDELRKHSKEVLDTVRDLLRRHKKKNEDSLRTVRKLLTDLEDAVRKI

SEQ ID NO: 24550 - protein, 58 aa, Artificial Sequence
  Synthetic
ERVKRVAEEIKKLLEDLRKESEDVVKELEDLLDELRRRTEKVVREIEELLKRLEERVK

SEQ ID NO: 24551 - protein, 59 aa, Artificial Sequence
  Synthetic
SEVERVERRLEKVIEEDKERTKRVEREVEDSNKKDDDLTREVLDRVRKSARDVERKLEE

SEQ ID NO: 24552 - protein, 55 aa, Artificial Sequence
  Synthetic
REALRRLRELVKKLEDDNRRVLRRLDKLLDDVRKKNEEAMRESRDLSRKVAEKIR

SEQ ID NO: 24553 - protein, 59 aa, Artificial Sequence
  Synthetic
DEVREVEKRVRESNERDKKLLREVLEEVRRSDKDDDDRTRKVLKRVEKAAEEVKRLLEK

SEQ ID NO: 24554 - protein, 55 aa, Artificial Sequence
  Synthetic
EDVIRKLRKSLKEVKDDSRRVLKELDDSLRETHKRNRDAMRRLDELLEEVARRIK

SEQ ID NO: 24555 - protein, 59 aa, Artificial Sequence
  Synthetic
DEIEEIKRRIEKSSEDDKRVLRELEARAREIRKELDERVKRLEKRIKELLERLRKLKED

SEQ ID NO: 24556 - protein, 58 aa, Artificial Sequence
  Synthetic
RDVRRVLEEWKRLSRKNEEENKAVIEKLRALLEDLKRRLKEVLKRIAELVKKIADELK

SEQ ID NO: 24557 - protein, 60 aa, Artificial Sequence
  Synthetic
RESEELRREIEKISRENKELVRRLEEAIKRLSDEDKELVERLRRETKKIADKVEDLLEKL

SEQ ID NO: 24558 - protein, 55 aa, Artificial Sequence
  Synthetic
EEVLREIKKIIDDNRRENREALERIKDIVRRNEEENEKALRESRKRTRELEERLR

SEQ ID NO: 24559 - protein, 60 aa, Artificial Sequence
  Synthetic
SRVETIRKRVEDLIRRSEDLIRRLEEDVKRVVDEIRKLLEKLKEDDERVIRRIEDLLRKE

SEQ ID NO: 24560 - protein, 55 aa, Artificial Sequence
  Synthetic
ERVVEEIKERLDRSRRRTEEALERIRKRLEEVKKEVEDVLREVEKTNREIKKEVR

SEQ ID NO: 24561 - protein, 60 aa, Artificial Sequence
  Synthetic
SRVDELRRRVEELLKRSKELLEEIKRRDEEVLRRIKELLDRLRERVDDALRKISELLTRE

SEQ ID NO: 24562 - protein, 55 aa, Artificial Sequence
  Synthetic
EEVVREIKKKLTESREDTKRLLEELKKTNDDIRKDVERLRREVEKKVRDIERRVK

SEQ ID NO: 24563 - protein, 59 aa, Artificial Sequence
  Synthetic
SEVEKLLEEVRELTKRHKEELRRLNKEMEKATRDHLRKSKKLNDEAREMVRRVEELVKN

SEQ ID NO: 24564 - protein, 58 aa, Artificial Sequence
  Synthetic
ERAARVKEELDKLHKDLEREVRESKRTLKELHDRLRKAVEESKEHLKRLLDELRKKVK

SEQ ID NO: 24565 - protein, 59 aa, Artificial Sequence
  Synthetic
DEVERLLEEVRRVVKEIEDRSRKLNEDARRVTEDHLRKSEELNRRVEDAVRRIRELTKN

SEQ ID NO: 24566 - protein, 58 aa, Artificial Sequence
  Synthetic
EEARKIRETLKRLLDELRKKLEESKKHLDELHDRLRRELEKSKRHLEELLKRLEDELR

SEQ ID NO: 24567 - protein, 59 aa, Artificial Sequence
  Synthetic
SELERLLEKARRDTERHLRESERLNRELKKATDDHLRKSRELNKRLEEVVRRVEEESRN

SEQ ID NO: 24568 - protein, 58 aa, Artificial Sequence
  Synthetic
REAKKVEDDLRDLHRRLKEAVDRSKKHLEDLHKELEDELKRSIDHLRKLLEEVKRKLD

SEQ ID NO: 24569 - protein, 59 aa, Artificial Sequence
  Synthetic
SRVEDLLRRVREVVKRVKKDLTKLLEEVKRMTDEHLKRSKELNDRAEEIVRRLKELLDR

SEQ ID NO: 24570 - protein, 58 aa, Artificial Sequence
  Synthetic
ERAREVVERLDELLKEVADRVEEVKDRLRKLHRKLEESVKKSLEHIKRLIDDLRRKAK

SEQ ID NO: 24571 - protein, 59 aa, Artificial Sequence
  Synthetic
RELEKLLEDARRVVTTLTRASEKLNEDVKKVTEEHKDRIRRLLDTVRRIVEEVDKRTKG

SEQ ID NO: 24572 - protein, 58 aa, Artificial Sequence
  Synthetic
EEARKVKEELDRLLEDLRKKLEDSKRHLDELHRELEETVREVSERLKELLDAVRRRAK

SEQ ID NO: 24573 - protein, 59 aa, Artificial Sequence
  Synthetic
SELEKLLKDVADMVREITERSKKLNDELKKLTEDHDRKIKRLNERLEEIIREVEKLVDD

SEQ ID NO: 24574 - protein, 58 aa, Artificial Sequence
  Synthetic
DEARKVAERLKELLDRLRRKLEESKRHADELHERLRKSVEDSKKHIKDLVDELKRRVD

SEQ ID NO: 24575 - protein, 60 aa, Artificial Sequence
  Synthetic
SRVEELLKRLEDATRRHLEVSKRLNDDLRRATKDHLDKLRELNERVKKVVDDVVEKIKSN

SEQ ID NO: 24576 - protein, 58 aa, Artificial Sequence
  Synthetic
EEAREVRERLDRLHEELEKEVRRSEKTLKELHDRLRKEVERSKRHLDELLKDLEDKVR

SEQ ID NO: 24577 - protein, 59 aa, Artificial Sequence
  Synthetic
SRVEKLVREVEKVVEEVERTIRKLLEDVKEMTDRHLKMIEDLNRELEEIVRRVTELIKN

SEQ ID NO: 24578 - protein, 58 aa, Artificial Sequence
  Synthetic
DEARKVKKRITELVERVEREVDRVKKELEKLHERLKREVEKSSEHIKRLLDELRKRAE

SEQ ID NO: 24579 - protein, 59 aa, Artificial Sequence
  Synthetic
RELEEILRRVKEVTKDHLDKIDELNKRLDKATKEHLERLRDLNRRLKEVVERIEEEIRN

SEQ ID NO: 24580 - protein, 58 aa, Artificial Sequence
  Synthetic
READKVRKDIRRLHEELAREVKKSEDHLRKLHEELRDEVRRSEEHLDALLEDLKRKVD

SEQ ID NO: 24581 - protein, 59 aa, Artificial Sequence
  Synthetic
SELEKLLRDMEEATKRHDEMLKKLNDEIRKVVERILKELEDLNRRLEEIVRRLKEESKN

SEQ ID NO: 24582 - protein, 58 aa, Artificial Sequence
  Synthetic
EEADDVRRRLERLHRELRKSVETSKKHLKELLDRLAKSIEDSKKHARELLKRLEEDIK

SEQ ID NO: 24583 - protein, 59 aa, Artificial Sequence
  Synthetic
SEVEELLDRVRKVVEDLMRESKRLNDELKKIVDDILRRLRELNKEIKDVVDEIKKLLDN

SEQ ID NO: 24584 - protein, 58 aa, Artificial Sequence
  Synthetic
EEADKARKDLKRLLDRLRREVERSKEEMDKLLEDLERAVRESEKHLEKLLRDLERRAR

SEQ ID NO: 24585 - protein, 59 aa, Artificial Sequence
  Synthetic
SRLEELLKRLDDIVKRVLTKIRELNERLKKIVEELLRRSEELNREVRRVAEEIRRLEEG

SEQ ID NO: 24586 - protein, 58 aa, Artificial Sequence
  Synthetic
DKARDVRRTIRKLVRDVAEAVRRSTEHIDKLLEDLEREVRRSERDIERILRELEEEAR

SEQ ID NO: 24587 - protein, 59 aa, Artificial Sequence
  Synthetic
SDVEKLLEDVRRMTEEHKELIKELNERVERIVRKVVEDSKKLNDELREIVKRVEDESRN

SEQ ID NO: 24588 - protein, 58 aa, Artificial Sequence
  Synthetic
EEAARVREDLDRLHEELERFVRESKKHLDEMLKELRRRLERSKEEIDRLVKEAEEKLR

SEQ ID NO: 24589 - protein, 60 aa, Artificial Sequence
  Synthetic
REVEEVLKEVKKIVDRNREELKRVLDEIRELVKRIEDDLRRVNEESEKLVRTLLELMRRG

SEQ ID NO: 24590 - protein, 55 aa, Artificial Sequence
  Synthetic
EEVRERIERLIEKSERDVREVKKKVEELARRLREEVEKLKKHVKRLLEELKKAAD

SEQ ID NO: 24591 - protein, 60 aa, Artificial Sequence
  Synthetic
SEAEDALRKIKKLVDEVVERIKKVDDDSRKLVEEVERTIEKLDKESEDLVKKVKDMKRRG

SEQ ID NO: 24592 - protein, 55 aa, Artificial Sequence
  Synthetic
EEVKKEVKRLLEELKRRLDESNKRNKRLIDELRKKLEDSRRRNEELLRDLKETAT

SEQ ID NO: 24593 - protein, 60 aa, Artificial Sequence
  Synthetic
DEAEEVERRSRELVERAKTEIEKLDRESKRLVDTVARKIEEVDKRSEELVRTVEELRRRG

SEQ ID NO: 24594 - protein, 55 aa, Artificial Sequence
  Synthetic
EEVEKENRELNRRLKEALDESNKRNRTLLEDLRRKLRESEERNRRLLRKLEEDAR

SEQ ID NO: 24595 - protein, 60 aa, Artificial Sequence
  Synthetic
SEAEEALKKVEELVRRVEEEIKRVDERSKDLVRRVERKLEELVERSKELVKRLLDMRRRG

SEQ ID NO: 24596 - protein, 55 aa, Artificial Sequence
  Synthetic
EDVERRVRELIERLKRKLEESNRRNKKLIDELRKRLEEVKRENEKLNEDLERETK

SEQ ID NO: 24597 - protein, 60 aa, Artificial Sequence
  Synthetic
DELERVLKRVKELIDKSRREDEELDERSKELVKKVLDELKDALRKIEKLVRDLKEMTDRG

SEQ ID NO: 24598 - protein, 55 aa, Artificial Sequence
  Synthetic
EEVRKDAERLIRENEEDNRRSNERNKKILKELKDALDRVKEEVRKLIRRLEEEAR

SEQ ID NO: 24599 - protein, 60 aa, Artificial Sequence
  Synthetic
SEAETVLEEVKKLVERSREEDKEVDDESRELVERVEEKLRRVLKKSKEDVDRVMRLIEEG

SEQ ID NO: 24600 - protein, 55 aa, Artificial Sequence
  Synthetic
EEVEDTIRRLIEENKKRNEESNRRNRELIKKLERKLEEVKRRNEDLNRKLEETAR

SEQ ID NO: 24601 - protein, 57 aa, Artificial Sequence
  Synthetic
STLEEAEEEVRRLIKRTEDETRRVADEVKKLLDKHRRATEDVEKKVRELLDRLKKDE

SEQ ID NO: 24602 - protein, 59 aa, Artificial Sequence
  Synthetic
DREIEKIVRRAKETNEENREIIERILKEIKELIDDANRKLKEILDRIRELVETVKRKAK

SEQ ID NO: 24603 - protein, 57 aa, Artificial Sequence
  Synthetic
STLEEVERRIRELLDRHRRATEEVEKEVDRLNKETRDELDRVRKEIEKLLKDLDRKE

SEQ ID NO: 24604 - protein, 59 aa, Artificial Sequence
  Synthetic
DEELRRILKRVEKLVKDLNDKLRKILDDARRSNEEIKRRLEEILKEVKRLVDTVTERAR

SEQ ID NO: 24605 - protein, 58 aa, Artificial Sequence
  Synthetic
SRIERAEEELKRSLKELREDLERVVRTIRKILREHEEKSKDVKRRIEELLREVKKRMV

SEQ ID NO: 24606 - protein, 56 aa, Artificial Sequence
  Synthetic
VDKVLRDVEDLNRTTLKLLEDLLRTVEEVVRRADKLLEDLLREIKRLVDEVMERDR

SEQ ID NO: 24607 - protein, 58 aa, Artificial Sequence
  Synthetic
SEIEEIEKEIRKSVEEVKKTLDKVVTEIRKSTREHEKKSEEVRKRSKELNKDLRDRLV

SEQ ID NO: 24608 - protein, 56 aa, Artificial Sequence
  Synthetic
VKTVLDDVRRVNEETKKRIRDLLEESKRSDEEADRRAEELLERNERLVRKVAEEAR

SEQ ID NO: 24609 - protein, 58 aa, Artificial Sequence
  Synthetic
SRIEEVIRRAREILEDHRRKSTEVRERLKKLLKEHEDKSRRVKEESEKINRDVKRELV

SEQ ID NO: 24610 - protein, 56 aa, Artificial Sequence
  Synthetic
VDKVLKEIEDLVRKADELLRELLKRVEDLVRRADEVLEELLRRNRKLAEDVMRKDK

SEQ ID NO: 24611 - protein, 58 aa, Artificial Sequence
  Synthetic
REIEEVEKEIKKLLDEHRKKSDDVVRKLEKILRDHERRTEDVKRESEKINREVEKRKV

SEQ ID NO: 24612 - protein, 56 aa, Artificial Sequence
  Synthetic
VDEVLERVRELLERADRKLEELLERVRKLVEDANRVIEEVLERNKRLADEAMKKDK

SEQ ID NO: 24613 - protein, 58 aa, Artificial Sequence
  Synthetic
SRIEEIVKRIRDILKEHEDKSRRVVEDIKRSTEELKRALREVVERIKTILDDVRRRLV

SEQ ID NO: 24614 - protein, 56 aa, Artificial Sequence
  Synthetic
VDKVLEDVRRVAKEADDRLEELLERSKKLNKETLDELERLLREVEELVKEVAERDR

SEQ ID NO: 24615 - protein, 58 aa, Artificial Sequence
  Synthetic
SRIEEVSERVREILRRHEEKSREVVERIKKSTKELRDEVRKVRATSKEINDDVRRRLV

SEQ ID NO: 24616 - protein, 56 aa, Artificial Sequence
  Synthetic
VDRVLERVEKMVRDADKRIDEVRKESERLNEETRRRIERLLRENKKLADEVAERAR

SEQ ID NO: 24617 - protein, 58 aa, Artificial Sequence
  Synthetic
SRIERVEERMRELLDRHRETSKRVVEEIRKSTEEHKEKSERVVRESERLNREVERELV

SEQ ID NO: 24618 - protein, 56 aa, Artificial Sequence
  Synthetic
VDRVLEEVERLVTEVNREIKELLERSKRSDKEADRRLEEVVKTNRELAERVARRAT

SEQ ID NO: 24619 - protein, 58 aa, Artificial Sequence
  Synthetic
SEIEEVVRRLEELVKRVAEELKRVVDRIEDLLREHKDKSRRVEERSKEINEDVARRLV

SEQ ID NO: 24620 - protein, 56 aa, Artificial Sequence
  Synthetic
VKEVLERVKKLVDDLIRRLKKLLEDLKKLVDDADEEIKRVLEENEELARRAAERDT

SEQ ID NO: 24621 - protein, 58 aa, Artificial Sequence
  Synthetic
SEIEDVVRRARELLERLRKRVREVVEDIRRSTEEHKEKSERVVKTSEELNKRLEDELV

SEQ ID NO: 24622 - protein, 56 aa, Artificial Sequence
  Synthetic
VDKVLEDVRRLVKEAVDRIDKILRDSRESDRRADEEIKKVLDRNRELVKKVADEDT

SEQ ID NO: 24623 - protein, 58 aa, Artificial Sequence
  Synthetic
DEIERVEEEIRRLLEEHKKRSDEVVRRLEKLLKDHKEVTRKVVEESERINRDVERRLV

SEQ ID NO: 24624 - protein, 56 aa, Artificial Sequence
  Synthetic
VKEVLERIRKLVKDVNKRLEEILEEVERLVRRANRRIEELLERNRRLVEEVARRDE

SEQ ID NO: 24625 - protein, 58 aa, Artificial Sequence
  Synthetic
SEIEKVEEEIRRILEEHKRISDEVKRRVRKSTEEHEKRTEDVERRSREINEEVEARLV

SEQ ID NO: 24626 - protein, 56 aa, Artificial Sequence
  Synthetic
VEEVLRRIRKLAEEVNKELKRLLDESKESDDRLNKRLTEILRENEELARDVARRVK

SEQ ID NO: 24627 - protein, 58 aa, Artificial Sequence
  Synthetic
SKEERIEEALRDLVRRHKEVSRRVVETIKDLAKKLEEKLRRVETDSKRINDEVRDKLV

SEQ ID NO: 24628 - protein, 56 aa, Artificial Sequence
  Synthetic
VERVLEEIKKLVEEVNRELRELLKRIEELLKRAEEMLERLLRENRRLVEEVARRDK

SEQ ID NO: 24629 - protein, 60 aa, Artificial Sequence
  Synthetic
SESEELDKEIDDIVREDEELNKELRKRNDDAVRRVEKVIEDLLRRNEDAAEKVKKLLEEL

SEQ ID NO: 24630 - protein, 55 aa, Artificial Sequence
  Synthetic
RELLRKLREILEDLRRKNERTEEESEEILRRLTKLAEEVLRRSRKILEDLREALR

SEQ ID NO: 24631 - protein, 60 aa, Artificial Sequence
  Synthetic
SEKDELRKRMRDISKENKELLEKLEREIRELSKENEKLNEKLRRELEELRKTIKDLLDRL

SEQ ID NO: 24632 - protein, 55 aa, Artificial Sequence
  Synthetic
RELLKEAKELLEENRKRNEEILRRAEKVLRDNAEKDKRTLEKVEEILDRLRRELT

SEQ ID NO: 24633 - protein, 60 aa, Artificial Sequence
  Synthetic
KEAEDLEREMREISDRNRKLNKKLRRDIKEISDDNRRLLEELRRRLKKMEEDVRRLLEEL

SEQ ID NO: 24634 - protein, 55 aa, Artificial Sequence
  Synthetic
RELLTEARKLLERNREEDKKSLDDARKALKENKEENDKIKEEIDKILRELEEELR

SEQ ID NO: 24635 - protein, 60 aa, Artificial Sequence
  Synthetic
EESERLAKRVDDLSRENEELNKRLRDEMEKISRENKELLKDLRRKADKIVKDVERLLEEL

SEQ ID NO: 24636 - protein, 55 aa, Artificial Sequence
  Synthetic
RELTRRIEKLLKDNTDRDKKSEDDLRELLKENKKRNDEILEEIRRILEELRKKLT

SEQ ID NO: 24637 - protein, 60 aa, Artificial Sequence
  Synthetic
SLDKEIERKVEEIERRLKESNDRLREKVDEIRRRSERLNTELNERVDRIAERIRRMKRDG

SEQ ID NO: 24638 - protein, 55 aa, Artificial Sequence
  Synthetic
ERLEEKIDRIIRELERRNDKSREELEKIIRELRERTKESEKRLEDIIRELEERTR

SEQ ID NO: 24639 - protein, 60 aa, Artificial Sequence
  Synthetic
DADKRLRTDVRRIVEDLKRSNEELRRRSEEIAKRSDKLNKELNKKSKEIEERVKRMRDEG

SEQ ID NO: 24640 - protein, 55 aa, Artificial Sequence
  Synthetic
KDLEKELRDIIRELRERNRESEEEDERIIRELEKRTKDSEKRDDEILRELEREIR

SEQ ID NO: 24641 - protein, 60 aa, Artificial Sequence
  Synthetic
SLVEKIAREVRKIKEDSKRLNDELNEKVRKAVEDLERSNRELEKRVREIEERVRRAETEG

SEQ ID NO: 24642 - protein, 55 aa, Artificial Sequence
  Synthetic
KELEDDIERIIKELEELTRRSEEKLRETIERLEERNKETAERLERIIKELEERSK

SEQ ID NO: 24643 - protein, 60 aa, Artificial Sequence
  Synthetic
KEAEELEERVKRIEEESRRLNRELNEKVKDIAKKLEDSNDKLRKDSEEIAERVKRARTEG

SEQ ID NO: 24644 - protein, 55 aa, Artificial Sequence
  Synthetic
DEVVKKLEDIIREIEKTTRESEKRLEDIIRKLKKKNDDTEREDREIVKRLREETK

SEQ ID NO: 24645 - protein, 60 aa, Artificial Sequence
  Synthetic
SLLEKLERDVERLSEEDEKLNEDVRRVDREIVERDKKLNREVNERVKRLAEEVKDIRRRV

SEQ ID NO: 24646 - protein, 55 aa, Artificial Sequence
  Synthetic
ERAEERLRRIIKRNKEENERTAKESRDSIEELKERNERSKRRLEKILEDLERETR

SEQ ID NO: 24647 - protein, 60 aa, Artificial Sequence
  Synthetic
REAEELEKRVRKIEREDDKLNEELNRRAKDVSREDKELNDRVREVVRRLVEEVDRIRRDV

SEQ ID NO: 24648 - protein, 55 aa, Artificial Sequence
  Synthetic
EELEKKLEDIIRELKKRNDESAERIRRLIKTNEDENRRTAEEIKKILDDIRRKVK

SEQ ID NO: 24649 - protein, 59 aa, Artificial Sequence
  Synthetic
SELEEIRKKIDDLRRRVEEINERITREDKRLVDELKEINKRITDRVRKIARDVEELLRK

SEQ ID NO: 24650 - protein, 60 aa, Artificial Sequence
  Synthetic
DEERLRTVDEEVKKILDELREKLDRNRRRSEETNRRLDELLKENARRVEEIIRRLREEVK

SEQ ID NO: 24651 - protein, 59 aa, Artificial Sequence
  Synthetic
SELEEIKKRVEEIARTLEKLNRDITKLDEDLAREVEDINRRITETVEEIAKRVERLREK

SEQ ID NO: 24652 - protein, 60 aa, Artificial Sequence
  Synthetic
DKERLDKLRTEVKKIMDDLRRILEKNAKDSKRSLDRLRKILEDNKEKVKRIADRLREAVR

SEQ ID NO: 24653 - protein, 59 aa, Artificial Sequence
  Synthetic
KDEKRIKDVLKKLEDDNKKLNDEIKKLNEEIARKNEELNKRIEDMIRKAEREVDELKRN

SEQ ID NO: 24654 - protein, 55 aa, Artificial Sequence
  Synthetic
KEVDDEARRILEKLRRENERTKEESKEINEELEKRNRESVERIKEILRRLEEKLR

SEQ ID NO: 24655 - protein, 59 aa, Artificial Sequence
  Synthetic
SEVERLLREVEKVLRRVVKRSRDLNEELKKRSKEHKETSERLNREMKRVLREVEKKIDE

SEQ ID NO: 24656 - protein, 55 aa, Artificial Sequence
  Synthetic
REVKKRLDELLKRLEREVRESEKRMDRSHEDVRREAERSKKELEELLKKLEDKVR

SEQ ID NO: 24657 - protein, 60 aa, Artificial Sequence
  Synthetic
SEVEKILRDVEDATRRHKRTSEELNRRLEEVVRRVKEESKELNERLREVVKRVKEEIRKT

SEQ ID NO: 24658 - protein, 55 aa, Artificial Sequence
  Synthetic
REVKKRIDELHDDLRRVMEASKERIDRILEDLRRVVERSKEELRKLLEDLKRTVD

SEQ ID NO: 24659 - protein, 59 aa, Artificial Sequence
  Synthetic
SEVEELLKRVEEATERHKREIERLEDEIRKVLEDVDKRSKELNDHNRDVIEKIRERIER

SEQ ID NO: 24660 - protein, 55 aa, Artificial Sequence
  Synthetic
REVKTELDKLHEDLKRTAEEVKKRLDDLLKELEKKVEESKTEIDRSLEELEKTAR

SEQ ID NO: 24661 - protein, 57 aa, Artificial Sequence
  Synthetic
DEERRVKEELEKLLEDLRRTIKKVEEDSDRINKDLERVIRRSEREADKILEDLERAG

SEQ ID NO: 24662 - protein, 59 aa, Artificial Sequence
  Synthetic
EEKLRELLERAKKLVEDIKRRLKELLDRHRDLVRRIKERSKELNKRLKDLIDEIKERAR

SEQ ID NO: 24663 - protein, 56 aa, Artificial Sequence
  Synthetic
SSKDDLRRKIEKLLRDLERVIRESEKRSEEINRDLERTLKRIKEEADKILDKVRRG

SEQ ID NO: 24664 - protein, 59 aa, Artificial Sequence
  Synthetic
DRLLEKLLRELEKLIRRIEEESRKLNEEHEKLLKRIKDELKKLLDDLRRLAREIEERRR

SEQ ID NO: 24665 - protein, 57 aa, Artificial Sequence
  Synthetic
KSTEDAKREIDKLLEELEETIRRAEDRSRRLNEDLARTLKRIEEELKRINEEVEKRG

SEQ ID NO: 24666 - protein, 59 aa, Artificial Sequence
  Synthetic
DELLKKLLDELRELIDRIRRDLERLLREHEELIERIKRTLEELLRRHRELVKRIEETAR

SEQ ID NO: 24667 - protein, 57 aa, Artificial Sequence
  Synthetic
SEEDRLEEEIKRILDDVARVVKRIKEELKRINDELKKVIDESRDHARRVNDDVRRRG

SEQ ID NO: 24668 - protein, 59 aa, Artificial Sequence
  Synthetic
EELLKELLKRLEELARRIKKKLEELLREHEKLLEEIEKALRRSNEEHRKLVEKIKRDAT

SEQ ID NO: 24669 - protein, 57 aa, Artificial Sequence
  Synthetic
DEEERVKEAVERLLRDLERAIKESEDHLRRLNEDLDRVIRESKEHLKKVNDDVRRAG

SEQ ID NO: 24670 - protein, 59 aa, Artificial Sequence
  Synthetic
EELLKKLLEELKRLIERIKRDLKRTNDEHEKLIREIKKRLEDSNRDHERLVKDIKETAR

SEQ ID NO: 24671 - protein, 57 aa, Artificial Sequence
  Synthetic
SKEDRLREELKKLLKRLREEIERLKRALEESNKDLKRTIDRSEKHLRDVNEDVKRAG

SEQ ID NO: 24672 - protein, 59 aa, Artificial Sequence
  Synthetic
EEELDKLLKEARDLIREIEKRLEELLKRVEKLTEDAKRDLERSNREHKELADRIKETAR

SEQ ID NO: 24673 - protein, 56 aa, Artificial Sequence
  Synthetic
SEAERIEEEARRLLEELRRAIERVKEEADRLLEELRDAIRKSKEHLKRLNEDVERA

SEQ ID NO: 24674 - protein, 59 aa, Artificial Sequence
  Synthetic
EEALKRLLEKLKRLIEEIKRELKRLLDDLKRLIDEIAEALKRSNDRHEELVRRIKEKAR

SEQ ID NO: 24675 - protein, 57 aa, Artificial Sequence
  Synthetic
DSKEEIRRKIDELLKRLEETIRRSEEHFRRSLDDARKELKRSRDHVRKVNKELRDRG

SEQ ID NO: 24676 - protein, 59 aa, Artificial Sequence
  Synthetic
DEELERLLRDLERLIREIEKTLEDTNRSNEELVRRLKRRLEESNKRHEDLADEIRRRTD

SEQ ID NO: 24677 - protein, 57 aa, Artificial Sequence
  Synthetic
SEEDRIREEMEEILRRVERTVEEIKKELKKINDDVDRTARESEKHVREVLERVEREG

SEQ ID NO: 24678 - protein, 59 aa, Artificial Sequence
  Synthetic
EELLEKLLEDLKRVVEKIRRDAEDLLERHKDLVRRIKEELRRSNRKLEDLVKKISERAT

SEQ ID NO: 24679 - protein, 56 aa, Artificial Sequence
  Synthetic
DEDREVRRTLEELLDDLRRVIEESERHLEKLNEDVREAIRRSEEHVRRVLDRVRRG

SEQ ID NO: 24680 - protein, 59 aa, Artificial Sequence
  Synthetic
EDLLRKLLEEAKRVLDEIRKTLKKTNEDHERLVERIKRELEKSNKDLERLAKEIIDRDK

SEQ ID NO: 24681 - protein, 57 aa, Artificial Sequence
  Synthetic
SSKEDITKKIEELLRELEEELKKSEKHLRELNEEAKRTAEESRRHLEESLRKVEKDG

SEQ ID NO: 24682 - protein, 59 aa, Artificial Sequence
  Synthetic
DEELKKLLKELEDLVKEIKERLRKTNEEHRKLVEEIKERLKRSNESNERLVRRIEEEAR

SEQ ID NO: 24683 - protein, 57 aa, Artificial Sequence
  Synthetic
SELERAEEEIEKLNRDLKRTLDEIRDRIRKINDDLRKTLRKSDEDSKRLLKELRDEV

SEQ ID NO: 24684 - protein, 58 aa, Artificial Sequence
  Synthetic
EKLKDMLDKHRKLIDDLKRRLERRLREHKRLLDEIEKRLRDSLKRIEEIVREILERAR

SEQ ID NO: 24685 - protein, 57 aa, Artificial Sequence
  Synthetic
DELERIRRELERINTTLDELLKRSKEETDRILKKVEDSIREVEKKVKELLEELKRRV

SEQ ID NO: 24686 - protein, 58 aa, Artificial Sequence
  Synthetic
ELLKKILDEHRDLLRRIEEELRRSLEDIKRVAKEVEERIKKVLDELRRLIEELLRRAK

SEQ ID NO: 24687 - protein, 60 aa, Artificial Sequence
  Synthetic
SVLEEAEKELRKIVEDNRRTLREVKERNKKLNKENRDTIKKIEDDVRRIIRELKEDLKRS

SEQ ID NO: 24688 - protein, 59 aa, Artificial Sequence
  Synthetic
EEDLRRLEEEIRRRSEENKKRIRDLLRRSEELSRRDKKKLKEILERIKRLADEVREKIR

SEQ ID NO: 24689 - protein, 60 aa, Artificial Sequence
  Synthetic
SDLEDILRKIEDLSRKNEEELKRVLEENKKLSDDDKRRLEKILREVEKKIRKIKKDIKDE

SEQ ID NO: 24690 - protein, 58 aa, Artificial Sequence
  Synthetic
EEVRKLEEDVRRIIERNKKLTEDLARELKKLNDDNERTLRKVEEDIRRIIADLRRTLK

SEQ ID NO: 24691 - protein, 60 aa, Artificial Sequence
  Synthetic
SELDEILERLRRLSEENKRRIEEALRRNKKLSEDDERLSREIRRRVRELVEEAKEVLRRE

SEQ ID NO: 24692 - protein, 58 aa, Artificial Sequence
  Synthetic
EEVKRVAEELDKLVKENRRVTEKVARELKKLNDKNREVNERLERELDKIIKDLRRTDK

SEQ ID NO: 24693 - protein, 60 aa, Artificial Sequence
  Synthetic
SEIEKILEDVKKLADDLRRTLKRALEENKELSDRDKEELRRILEEIKKLAEEIDKLIKEE

SEQ ID NO: 24694 - protein, 58 aa, Artificial Sequence
  Synthetic
ERVREVARRIEKIIEDLRRDLERVRRELKKLNDDNRRVLEEVKRTVEEIIKRLRESAK

SEQ ID NO: 24695 - protein, 60 aa, Artificial Sequence
  Synthetic
DEVDELLKEAEEVIREVTREHKRLLDEARKISEENKKRSEESNREVRELVRRIKEEIKKG

SEQ ID NO: 24696 - protein, 59 aa, Artificial Sequence
  Synthetic
SEKAKRVEEELKKLLDKLSRITEEVERRLEELLKDNERVSRESDEELKRILEDVERDTR

SEQ ID NO: 24697 - protein, 60 aa, Artificial Sequence
  Synthetic
SEVEELLDRLRKLIEDVVREHKRLLDEVRRISRENEELIRRLLEKVEEVIRRIKERIKSG

SEQ ID NO: 24698 - protein, 59 aa, Artificial Sequence
  Synthetic
EKTAREAEEELRRLLERLSEVTRKVEKAIEDILRRNRETSERVAREIRRLLKELEDTAR

SEQ ID NO: 24699 - protein, 60 aa, Artificial Sequence
  Synthetic
SSVEELLERLRRISEENKRRIEKLLREVEKVLRELKDRHRKLLKRVEEIIRKVKEEIKSG

SEQ ID NO: 24700 - protein, 59 aa, Artificial Sequence
  Synthetic
RETAERARETLKRLLDENRDRSKKVKEEIRRILEDLTRTTERVKREIKKLLKELEDTAR

SEQ ID NO: 24701 - protein, 55 aa, Artificial Sequence
  Synthetic
DLLRKLLEEAKKILKEIKDAHEKLLRELEESNKELEKAHRKLLEDAKRMLDDLKR

SEQ ID NO: 24702 - protein, 59 aa, Artificial Sequence
  Synthetic
EDRVRDLRRALEELIKESDEVSRRLKEEIDRSLESSKKVSRDLEEELKKLIKDLEDTRR

SEQ ID NO: 24703 - protein, 55 aa, Artificial Sequence
  Synthetic
SELEKLLRDDRELLKELKKAHKKLLDELKESNDRVRKRHEELLRRIREIAKRLRD

SEQ ID NO: 24704 - protein, 59 aa, Artificial Sequence
  Synthetic
KDKVRRVERESKKTHDESREVSEKLRRDAEDSLRSSEKLSEDLERELRKLIKEVRDEAK

SEQ ID NO: 24705 - protein, 55 aa, Artificial Sequence
  Synthetic
KDIERLLEELKRILEDLKRKHKRLLERLEDSNRRIRRTLEELLKRLEKLVKDLSD

SEQ ID NO: 24706 - protein, 59 aa, Artificial Sequence
  Synthetic
KDKVDDAKRRLEELLKESREVSKKLRDDIERSIRSLREEVKKLDEDAKRLLDKVREEIR

SEQ ID NO: 24707 - protein, 55 aa, Artificial Sequence
  Synthetic
SVLEDLIRRDREMLKRAKEEHDRLRKEIERSNREIDEEVKRLLAEIKKIVEEVSK

SEQ ID NO: 24708 - protein, 59 aa, Artificial Sequence
  Synthetic
KKAVDEVRKESDDTHKESEAVSRDLKRELERSIKSLEKRIREAEEELKRILKELEDEKR

SEQ ID NO: 24709 - protein, 55 aa, Artificial Sequence
  Synthetic
EELERLLEEDKELVRRVERELERLLRELKRSNDEIKKTLEDLLRRIEEILKEIRR

SEQ ID NO: 24710 - protein, 59 aa, Artificial Sequence
  Synthetic
KEKVKRAEDRSRETHRRLEEVVKKLKEDAERSIKSLEELVDKLRKELRRLLEEVREEVR

SEQ ID NO: 24711 - protein, 55 aa, Artificial Sequence
  Synthetic
RELEELIKEDEDLLRRLAETLKKLLEDVRRSNEELRKFHEDLLRDLERLLEELRN

SEQ ID NO: 24712 - protein, 59 aa, Artificial Sequence
  Synthetic
KEKVRRVEERSRRTHKELEDLAREVDKELKKSIKSSRDVTRKVKEDADRLLKKVADDTK

SEQ ID NO: 24713 - protein, 55 aa, Artificial Sequence
  Synthetic
SILETLADRDRDMVRRVKEALKKLLERDKRALERLKRVHKELLDRLRKILEDLKR

SEQ ID NO: 24714 - protein, 59 aa, Artificial Sequence
  Synthetic
EEKVKRVEEESRRTHKELKDVADRVETESDKSHEESKKVTDEVRKELERLLRELEETVR

SEQ ID NO: 24715 - protein, 55 aa, Artificial Sequence
  Synthetic
SEAEKLLRELEDILKKLKDALKRLIEEDERLLKRLKREHEKLLKRLEEVLRELKK

SEQ ID NO: 24716 - protein, 59 aa, Artificial Sequence
  Synthetic
REKVKRVKDEADRLLKELEDVVREVKKRSDESHKRSRDVTREMKKELKRLLEELEKTVR

SEQ ID NO: 24717 - protein, 55 aa, Artificial Sequence
  Synthetic
SELERLLREDEEMVERVERVLKELEEEVRKALKRAKEMHRRLLERLKTILDELER

SEQ ID NO: 24718 - protein, 59 aa, Artificial Sequence
  Synthetic
KEKVKELERRSRKTHKELADKADTLRKRLEEVIKESEDVTEELERRLKKLIDDLRRSVT

SEQ ID NO: 24719 - protein, 55 aa, Artificial Sequence
  Synthetic
SELEKLLRELEELLKELKRVLEELIERDKRLLDRLKEVHERLLRRLEKLLKELKD

SEQ ID NO: 24720 - protein, 59 aa, Artificial Sequence
  Synthetic
EDKVREAKRELERLIEELRRAVRRVEDESRRSHEESKKVTDDLDKRARELLEELRETIR

SEQ ID NO: 24721 - protein, 60 aa, Artificial Sequence
  Synthetic
REVEELEKDVRRTLDELRKRHRDNNERIKKILRELEDLHRRNNERTKTLLARIRELRERG

SEQ ID NO: 24722 - protein, 55 aa, Artificial Sequence
  Synthetic
RELERKLKELVKDVEKVIEDDDRSADKLLTKVKRDADEDRKSNEKLVREVREELR

SEQ ID NO: 24723 - protein, 60 aa, Artificial Sequence
  Synthetic
SEAEEVLKRVEEVVERLKKLHDDNNKKLRDAVRRLKRLHTEHNKETKEIKKEIEDLIRKG

SEQ ID NO: 24724 - protein, 55 aa, Artificial Sequence
  Synthetic
REVEKRLKEVVKRIDEVAEEDERSIREILRELRKVIEDDERSNRKVAKEIRESAK

SEQ ID NO: 24725 - protein, 60 aa, Artificial Sequence
  Synthetic
DKVREVLERLKKLVEDLKRLHKRNNEEVRRVIEEIKDRSRRNNKRTEDILRDIEREIRRG

SEQ ID NO: 24726 - protein, 55 aa, Artificial Sequence
  Synthetic
ERIKEELKKLVEDVRRTAEDDRRTIEDLVRKVEEVLERDRKSNEEAARDVDRKLK

SEQ ID NO: 24727 - protein, 56 aa, Artificial Sequence
  Synthetic
RSVEEVKKELDDSDRRDREVVKEARRRLEESKDRLRKIIERAKEELDKSDERIKKN

SEQ ID NO: 24728 - protein, 59 aa, Artificial Sequence
  Synthetic
DEELKKLLKHNREVLEDSRRKIEELLRTNEKALEDVKRAIEELLKHNEEVLKEVDDRTR

SEQ ID NO: 24729 - protein, 56 aa, Artificial Sequence
  Synthetic
KEVEDAEKRLRDLLKEDRELIERLRRALEESLKEDRKVIKELREELDKSDRKVEED

SEQ ID NO: 24730 - protein, 59 aa, Artificial Sequence
  Synthetic
REDIKRLLEELEEVLRRSEKKLRELLDTNRKILEESKERLRRLLEHNKRVLRRVVEETR

SEQ ID NO: 24731 - protein, 56 aa, Artificial Sequence
  Synthetic
SDEERVEKELKKSDDEDKKLIDELTRRLRESLKRLEEEVRRAREELDKSDEEVRKA

SEQ ID NO: 24732 - protein, 59 aa, Artificial Sequence
  Synthetic
REDIERLLDHNRKVLEKSADDLRKLLKTNEEILRRVAKAIRDLLEHNRRVVEEVKERAR

SEQ ID NO: 24733 - protein, 56 aa, Artificial Sequence
  Synthetic
SEVEEAKRRLDESDKDDRRVIDKLRKELEKSREEAKRLIDRLREELKDSNREAEEA

SEQ ID NO: 24734 - protein, 59 aa, Artificial Sequence
  Synthetic
REDLRRLLEHNKEVLERSKKRLEELSETNKKFLEEVKDALRELLKTNREVLREVKERTK

SEQ ID NO: 24735 - protein, 56 aa, Artificial Sequence
  Synthetic
SSVERAKRELDKSLKEDRDTIRDLKRRLEESRKRDREVIEELKKILKKLLDEVKDS

SEQ ID NO: 24736 - protein, 59 aa, Artificial Sequence
  Synthetic
DDKIKKLLDHNRKVLEDSKEELRRLLETNKRILEESKKRLDRLAEEIEKVARTVKEEAR

SEQ ID NO: 24737 - protein, 56 aa, Artificial Sequence
  Synthetic
DEVERAEEELRKSDEEDRRVVKRATETLKKSKDELEREIKRLEDELERSNREVEER

SEQ ID NO: 24738 - protein, 59 aa, Artificial Sequence
  Synthetic
REEIKKLLDHNRRVLEESERRIRELLRTNREVLERVKKELDELLEHNRRVLEEVEKRVR

SEQ ID NO: 24739 - protein, 56 aa, Artificial Sequence
  Synthetic
SSVEKAKKRLDESDKTDRDVIKRLREELKKSEDTDRELVKKVKEEIEKVEEELRRR

SEQ ID NO: 24740 - protein, 59 aa, Artificial Sequence
  Synthetic
DDKIRRLLEHNEEVMKRSKERLDDLVRTNRKILEESKRKIEKLLKELREVVEEVDRRAR

SEQ ID NO: 24741 - protein, 56 aa, Artificial Sequence
  Synthetic
DKAERVREEIEKLERELRRVLKESREHTKKLEEDLERVLRRSREATKKLKEDLERN

SEQ ID NO: 24742 - protein, 58 aa, Artificial Sequence
  Synthetic
ELIKRMLEELKRLLEELEKRIRDSNAELEKLLRDLIRKLERSLREIKRVLEELKEEAR

SEQ ID NO: 24743 - protein, 60 aa, Artificial Sequence
  Synthetic
SEVETLMREIKKLIDDIKRKNEDSNREIREVSRKTEEDLRDLLRKAREVAEKLKDELRRR

SEQ ID NO: 24744 - protein, 59 aa, Artificial Sequence
  Synthetic
EEKVKRLEDSLERLKRDLRKIIKENEDELRKINRRNEELIKKAEEDLRRLSEDLKRAEK

SEQ ID NO: 24745 - protein, 57 aa, Artificial Sequence
  Synthetic
SELEEVLRRIEKLVRKAHKENEDVLREIERLVRTAHRLNKKVDDDSAKIAEDLKREK

SEQ ID NO: 24746 - protein, 58 aa, Artificial Sequence
  Synthetic
ERVRRLKEILERLKEEVRRSLEELRKEVERLKKEVEDSLRELKKSLEEWVKDLEEATR

SEQ ID NO: 24747 - protein, 57 aa, Artificial Sequence
  Synthetic
SDLEAVLDEIKKLAEEAHKRNEEVDKESAKLVKEAHKVNEDVDKESAEIVKRIDEEK

SEQ ID NO: 24748 - protein, 58 aa, Artificial Sequence
  Synthetic
ERVKRLKDELRRLLKEVKDSLEELDRMLEEWKERVRRSLEELRKRAKEWEDKLRESLR

SEQ ID NO: 24749 - protein, 57 aa, Artificial Sequence
  Synthetic
SELEDVLKKIRKLVRDAHEENKRVLEEIRKTVDEIRKELEDVDTKSAEIAERAKERK

SEQ ID NO: 24750 - protein, 58 aa, Artificial Sequence
  Synthetic
ERVERLRRELEKLVREVEESLKRLKEELDKIKEELRRILEELEEKLRRWSRELKETAR

SEQ ID NO: 24751 - protein, 58 aa, Artificial Sequence
  Synthetic
SELEKVVEDLRRIVEEIERRLREVIKEIRELVRRAHERNKDVDRKSAEIVKDIEEKKK

SEQ ID NO: 24752 - protein, 58 aa, Artificial Sequence
  Synthetic
ERVERLKRALDELERRLKELVRELEDSLKKLADEVKRSLEELDKSLKDWKKKLDDELK

SEQ ID NO: 24753 - protein, 57 aa, Artificial Sequence
  Synthetic
SEIERVLEEIKERVERADRKNEKVDRESAEKVKELHRRNEEVDRESAETVKRAERDK

SEQ ID NO: 24754 - protein, 58 aa, Artificial Sequence
  Synthetic
DKVREIRERVERLVKAVDESLERLERSLEEWARRLDKSLEDLKRSLKRWKEELDRKAQ

SEQ ID NO: 24755 - protein, 57 aa, Artificial Sequence
  Synthetic
SELETLIKEATDLAEEVKEDLRRVDEESAKLVEDADDENKRVDEESAKIVEDLKREK

SEQ ID NO: 24756 - protein, 58 aa, Artificial Sequence
  Synthetic
ERIRDLKEKVRRLMEDVKRLLEELERSLERWKEKVRDSLEKLKKSLEEWAKELKDTSK

SEQ ID NO: 24757 - protein, 57 aa, Artificial Sequence
  Synthetic
KDLETVLEEIKRIVDDLDRRNKEVDKESAKLVKEADEKNKRVDEESAKIVKRLEREK

SEQ ID NO: 24758 - protein, 58 aa, Artificial Sequence
  Synthetic
DRVRRLREEVTKLLDEVRRSLDRLRESLKEWKERVDDSLRRLRDSLRKWKRKLEEATR

SEQ ID NO: 24759 - protein, 57 aa, Artificial Sequence
  Synthetic
SELDDLLRRIRELVRRAEEDLKRVNEESARLVEEMDKDNKRVDEESAKIAEDLKREK

SEQ ID NO: 24760 - protein, 58 aa, Artificial Sequence
  Synthetic
KKIEELKREVKKIADELERILKELEDSLREWSERVRKSLEELKDSLRRWAEELKRDLK

SEQ ID NO: 24761 - protein, 57 aa, Artificial Sequence
  Synthetic
KDLERVVKEIERLVREAEKKIREVNDRSAKLARDLDRRNREVLKEIKKIAEDLEREK

SEQ ID NO: 24762 - protein, 58 aa, Artificial Sequence
  Synthetic
ERVERLKRELERLKRELEETLKRLDEELEKWEERVRESLKRLEDRVREILKRLEDDAR

SEQ ID NO: 24763 - protein, 57 aa, Artificial Sequence
  Synthetic
DELETVMKRIRELAKELNKKNKDVLDEIEDLVRKADKRNKEVLKRIEEILREARKRK

SEQ ID NO: 24764 - protein, 58 aa, Artificial Sequence
  Synthetic
ERVKRLKDELRRLIEEVRRNLKRLKEEVDKIRERVRRSLKKLKEDVKRLSDEVKETLK

SEQ ID NO: 24765 - protein, 60 aa, Artificial Sequence
  Synthetic
KEIEDLLRELRELVKEIDDLIKDATREIERLVKEVHDKNEKVTRRLEKLMRELREVARRG

SEQ ID NO: 24766 - protein, 58 aa, Artificial Sequence
  Synthetic
ERIETLERALRELVRELEEKVDEHRKRTDKVARDLKKSVDDHRRRTEELVRELRKTEE

SEQ ID NO: 24767 - protein, 60 aa, Artificial Sequence
  Synthetic
SELEDVLRRAKKLVEDVHRDNKRVTEELEKLARELHKKNEDVLRELKKLADDLREMLKRG

SEQ ID NO: 24768 - protein, 58 aa, Artificial Sequence
  Synthetic
EKVKRLEEEIRRLARELRESVRRHKERTEELVERLKESLKKLEEDIRRLEKELEDDRR

SEQ ID NO: 24769 - protein, 60 aa, Artificial Sequence
  Synthetic
SDLDDVLRRIRELAKRVHDENKRVTEELERLVEELEKKARELLRRIEELVRTLKEMRERG

SEQ ID NO: 24770 - protein, 58 aa, Artificial Sequence
  Synthetic
ERVERLRRELEKLVKELEESVRRHKKRTRELEERLKDVLRELEDAVRRLVEELEKTDE

SEQ ID NO: 24771 - protein, 60 aa, Artificial Sequence
  Synthetic
EEIERLLEEIKRLVETVHESNRRVLKELRDLAEELKRRNTKSNRDMERLVEELEEMRRRG

SEQ ID NO: 24772 - protein, 58 aa, Artificial Sequence
  Synthetic
EKVKTARDEVRRLVEELKESVERLARELKKLVDELRKVDEDNKRRLEELERRLRESTR

SEQ ID NO: 24773 - protein, 60 aa, Artificial Sequence
  Synthetic
SELEDVLRKLEKLAREVDKINKDLIKRVEELARELKKKNEKSNKEARDLVKKLKEMKDRG

SEQ ID NO: 24774 - protein, 58 aa, Artificial Sequence
  Synthetic
ERVRRLKKEVEELERRLRRSVDDLRRKIKELEDRLREIDERNKREIEKLVKELRDTDR

SEQ ID NO: 24775 - protein, 60 aa, Artificial Sequence
  Synthetic
DELETVAKLLEDLSRTNEDRLREVKETLKRLADTVDKINKEVLRRLRELAKRLKELKERG

SEQ ID NO: 24776 - protein, 58 aa, Artificial Sequence
  Synthetic
EDVRRLEEELRKLEERNRRLVRELEEVLKKLKDELKKSVDRLKEELDRLVKELDEIKK

SEQ ID NO: 24777 - protein, 60 aa, Artificial Sequence
  Synthetic
SEIEDALRKMEKLAEDVNRKNEEVIREVRRLSEENKKKLDDVLETLKKLVRELAEMTKRG

SEQ ID NO: 24778 - protein, 58 aa, Artificial Sequence
  Synthetic
ERIRTLEKAVRDLVRELEESVDRLRREADRLVEENERVVERLKRELKRLVEELERRAK

SEQ ID NO: 24779 - protein, 60 aa, Artificial Sequence
  Synthetic
DELREVLERVKRLVDTVNKINDDLTKRNEDLSRKNVDKIRRLTEEIERLVEEVDRARREG

SEQ ID NO: 24780 - protein, 58 aa, Artificial Sequence
  Synthetic
EDVRRLEEEVRKLVEELRRSVEDHKRRNKESVDRNRRAVEEHERRNREVVERLERKAK

SEQ ID NO: 24781 - protein, 60 aa, Artificial Sequence
  Synthetic
SDIEEALKTMEELSRRNEETLRRVLKRLKELADEVNRKNERVLEEAKELADRLRELRERG

SEQ ID NO: 24782 - protein, 58 aa, Artificial Sequence
  Synthetic
ERIKTLEEDLRRLVEENKKVVEELKRRLKKLVDELRESLKELEKAVRKLVKELRDDEK

SEQ ID NO: 24783 - protein, 57 aa, Artificial Sequence
  Synthetic
SSKETVAKRVEDVKRELEEVLKELARESKRLSDRDKKLNEEAAEEIERLKDELRKKV

SEQ ID NO: 24784 - protein, 59 aa, Artificial Sequence
  Synthetic
DEVLERIVKRVRDLVEEIKRRLEKLAEDNRRLSKRNEDVIRTLLEEARKLVEKVKEEVR

SEQ ID NO: 24785 - protein, 57 aa, Artificial Sequence
  Synthetic
RSKEEVAKEIKRLKEENKRLLDELAKRSEELERRDRRLNEEHHREIRRLTDELRKKV

SEQ ID NO: 24786 - protein, 59 aa, Artificial Sequence
  Synthetic
DRVLKEIVDEARRLSERNEEVLRRLLKENEDLSKRNEDFIRKTMKELRDLAEEVKERAK

SEQ ID NO: 24787 - protein, 57 aa, Artificial Sequence
  Synthetic
KSKEDVKREIERLKKENREVLDTARKRIEDLIREDERVNREAAEEIKRLVEELERRV

SEQ ID NO: 24788 - protein, 59 aa, Artificial Sequence
  Synthetic
DRVLKEIVEELRRLSEENKRRIERALEELEKLSKDNTDRIEEAREDLRRLVRELLEKEQ

SEQ ID NO: 24789 - protein, 57 aa, Artificial Sequence
  Synthetic
KDEEEVAKEIERLKEENDRVLKEAADKIEKLKKENREVNTRAAEEIERLKKELREKV

SEQ ID NO: 24790 - protein, 59 aa, Artificial Sequence
  Synthetic
SRVLEEVVRRLRKLSEENKKRIKEMLDDVERLSRRNEEKIRRVLEDARRLLEDLTRKAK

SEQ ID NO: 24791 - protein, 57 aa, Artificial Sequence
  Synthetic
SEKETVAEEIRRLIEKNKKMLEDHTRDIRRLEKENDDVNRKHHEDIRRLKDRLRKEV

SEQ ID NO: 24792 - protein, 59 aa, Artificial Sequence
  Synthetic
SRVLKEIVDEARELSKRNEDKIRKSLEELKRLSERNKKKIEDTLKELRKLAEEVKRRAT

SEQ ID NO: 24793 - protein, 57 aa, Artificial Sequence
  Synthetic
SEKERVADDIRKLEEENKEVLDRAAEEIKRLKKRDRELNKRHHKTIRDLVDELEKKV

SEQ ID NO: 24794 - protein, 59 aa, Artificial Sequence
  Synthetic
SRVLDEIVKEARDLSEENRKLIEEALERLRRLSRENEETIKKTMEELKRLVEEVKERAR

SEQ ID NO: 24795 - protein, 57 aa, Artificial Sequence
  Synthetic
KSKEEVADKIRKLKEENRKVLERHTREIEKLKRDDEEANKKHHEDVKEVMKRLEKEV

SEQ ID NO: 24796 - protein, 59 aa, Artificial Sequence
  Synthetic
DRVLEEIVREAEELSKRNKDRIDESLKELRKLSEDNKREIERTLEEIKRLAEEVRRRDT

SEQ ID NO: 24797 - protein, 57 aa, Artificial Sequence
  Synthetic
SSKERLKEMIDRLKERNKDLLRKAAEEIKRLEDEDREVNRRHHEEIERLKKELREKV

SEQ ID NO: 24798 - protein, 59 aa, Artificial Sequence
  Synthetic
DRALDEIIKEAKKLSDDNERLIRDVLRRARDLSRRNKETIRRTLEKLKREAEKVKEDAR

SEQ ID NO: 24799 - protein, 60 aa, Artificial Sequence
  Synthetic
SDADRIIEEARRLSEENKRRIEEVLKRNRKLSKENHDKNDELLKRVRELLRRVVERLRRE

SEQ ID NO: 24800 - protein, 59 aa, Artificial Sequence
  Synthetic
KDKLKRLEDEVRKLTDENRRVTEKAERDLRRSNRENDRSTERLEEEIRRIKKRLRDEAR

SEQ ID NO: 24801 - protein, 60 aa, Artificial Sequence
  Synthetic
REAEDLIRRLRELVRRHHELNRKLAEELRKLSEENKRKIEKVTREVEKLVKDVADTLKDD

SEQ ID NO: 24802 - protein, 59 aa, Artificial Sequence
  Synthetic
KDKLKRLEEELERLKEEVRKSNRDLEKEVRDLRKENEKVTEEVKKRIEDLKRKLDEDRR

SEQ ID NO: 24803 - protein, 60 aa, Artificial Sequence
  Synthetic
SEVDKIIKDARDLLKEHHEKNKRLIEENRRLSEENKDRIRRALEKLKKLVDDLRRLIEEV

SEQ ID NO: 24804 - protein, 59 aa, Artificial Sequence
  Synthetic
KKKLDELETEVRRIKETIDRSNERLERELEKSNRENKKVTDDAREVVKKLKEEIKRDED

SEQ ID NO: 24805 - protein, 60 aa, Artificial Sequence
  Synthetic
SEADEIIKEAKKLADDHHRLNKEIIERNKRLSEENHKLNEKIIEDVRRLVKDVAERLKRD

SEQ ID NO: 24806 - protein, 59 aa, Artificial Sequence
  Synthetic
KEKLDRLREKVEEIKRRVDKSNDELRRSMEESNKRNDESTDRLREELRRLDEELDRRRK

SEQ ID NO: 24807 - protein, 60 aa, Artificial Sequence
  Synthetic
SDLERVLKELRELVRRHHELNKDIIRRARRLSEENEKDIKKLLDDARKLLEEVKRTLDRM

SEQ ID NO: 24808 - protein, 59 aa, Artificial Sequence
  Synthetic
KKKLDEARTELRKLEEEVDKSNKELRDEVEKLERRNDELLERAREEVERLKEELRRKAT

SEQ ID NO: 24809 - protein, 60 aa, Artificial Sequence
  Synthetic
SKAERIIEEVRRLSEDNKRRIKKLLDEAKELLDRHHKRNKELLEEIERLLREVKERLKKD

SEQ ID NO: 24810 - protein, 59 aa, Artificial Sequence
  Synthetic
KDRLEELRRDLERLRKENKDVLDRVREDIKRLKEELDDSNRRLKDTIEDLKRELDEEAR

SEQ ID NO: 24811 - protein, 60 aa, Artificial Sequence
  Synthetic
SEVEELVKDLKRILDEIKRTNDELNKELKRLSDESRKLSKENIDRLRRILEEIEKTIRRR

SEQ ID NO: 24812 - protein, 59 aa, Artificial Sequence
  Synthetic
EEKVRKLEKLLEDIKRTVDKIIRESEKRAEEINRDNRRIIEENKKKLEEIARRVEELAR

SEQ ID NO: 24813 - protein, 60 aa, Artificial Sequence
  Synthetic
SSIEELAKRLEDLIRELRDRHRRLNEELKELTDRNRKEIEEANERIKRLIDDLERLRRRG

SEQ ID NO: 24814 - protein, 58 aa, Artificial Sequence
  Synthetic
EEIDKLRRELERLEEELKKVLDRTREELERLVRDNRRLNKEHKDHSDTLVRRLEESRK

SEQ ID NO: 24815 - protein, 60 aa, Artificial Sequence
  Synthetic
SEVEDLIRDLERLLKEHDELNKRSMEELEKLLKDLEKMVRDSLREAREIAERVKETIKRT

SEQ ID NO: 24816 - protein, 59 aa, Artificial Sequence
  Synthetic
EKKLDEARKVLEEIKKRLEDSLRRLREEAERIKRELKRILDEHRKEIERIKKEIDEAAR

SEQ ID NO: 24817 - protein, 60 aa, Artificial Sequence
  Synthetic
SEIEKVLRDVEKLVREHEDLNKKSAEEAERLTRDNKRRVDESKKRIREILKEVDEIIRRT

SEQ ID NO: 24818 - protein, 59 aa, Artificial Sequence
  Synthetic
DKDLRRLAEEAERIKKRLRDSLDELRKIIEELEERNRRINEDHRRDLEDVKRRIEEKSK

SEQ ID NO: 24819 - protein, 60 aa, Artificial Sequence
  Synthetic
SEIEEVARRAEKLTKENEELIRRSLRDIERLVKEMEDIVRKSLKEIKELVERLKDISRKT

SEQ ID NO: 24820 - protein, 59 aa, Artificial Sequence
  Synthetic
DEKLRRLAKRIEELKKRNEDLNREHRKRLEEAEKRLKDVLDEHRRRLEEVKKELDEEAK

SEQ ID NO: 24821 - protein, 60 aa, Artificial Sequence
  Synthetic
DEIERVLEEIKKLTDDNRKLVKESIDRAEELLKRHEEENKKSVERARKLVRDLDEIRRKT

SEQ ID NO: 24822 - protein, 59 aa, Artificial Sequence
  Synthetic
KKKLDELARRAEDMERDNKRINKEHRERIKEIKERIKESLDRLAEEIKKIEKELEDKAR

SEQ ID NO: 24823 - protein, 60 aa, Artificial Sequence
  Synthetic
SEIEKVLEDAKKLTKENEDLIRKSLEDNERLLRRHEEENKKSAEDMRDLLRRLEDIIRKT

SEQ ID NO: 24824 - protein, 59 aa, Artificial Sequence
  Synthetic
EELLERLAREIKKLIDKNRKLNEDHRRESEKSERRLRESLRKLAEEAERIEREMDKSRK

SEQ ID NO: 24825 - protein, 60 aa, Artificial Sequence
  Synthetic
SKIEKIVRDAERLLDELRKLAEDVLRRLEELNRRAEDVIRRLAEENTELLKRLEDLLETE

SEQ ID NO: 24826 - protein, 59 aa, Artificial Sequence
  Synthetic
KKKAEELKRKAEEIKRRIDKIVDEVRKAIRDSAEHLKRLLEEYRRRVEEVKKRVRDAAK

SEQ ID NO: 24827 - protein, 60 aa, Artificial Sequence
  Synthetic
DELERLREEVKRLSEENKELIKEMEKRNRELSKENEKVNRELKKRVDDIIRTLKELRKEG

SEQ ID NO: 24828 - protein, 62 aa, Artificial Sequence
  Synthetic
EKEEREIRRVLEDIKRIADENERENREALKRLEETNKRNTDHNRDVLREIDKLFREVAEELR

SEQ ID NO: 24829 - protein, 59 aa, Artificial Sequence
  Synthetic
SEKEEVIKRIREELKENEKENRDVIRKIRELLDELRRRVEEVLRRLKKSNEDIEREAEK

SEQ ID NO: 24830 - protein, 56 aa, Artificial Sequence
  Synthetic
EEELKERIKKLSKENKDRVRRMLERIKKLVDDLRRLLEELRRRNEKLLDRLRKAIK

SEQ ID NO: 24831 - protein, 59 aa, Artificial Sequence
  Synthetic
KDEEKVIEDIRRILEENHRENKEVIDKIRELLRRNEEENKEAIRRMRKSNKEITDRAEE

SEQ ID NO: 24832 - protein, 56 aa, Artificial Sequence
  Synthetic
REELERRVRELSKENKEMLKRVEDKIRELSERNKRTVKKVREDNERLIRRLEEEDK

SEQ ID NO: 24833 - protein, 59 aa, Artificial Sequence
  Synthetic
SELERIEEDVERLNRRNEETLKRIDEALKRLEKSNKELDEKLEETVKRIKDRVERVKRR

SEQ ID NO: 24834 - protein, 62 aa, Artificial Sequence
  Synthetic
DKAKREVDKVRTDAREILKENKRRNEDVIRKIEEKVRDLERRNRDLLRRVKTKIDRLREELK

SEQ ID NO: 24835 - protein, 56 aa, Artificial Sequence
  Synthetic
KELEDIARRVDELNKRNEELIKDAKRVLKEASDKNKEMNERVDDKLRRLAKKVKEL

SEQ ID NO: 24836 - protein, 62 aa, Artificial Sequence
  Synthetic
KEERDKIRDLLRRIREKIEKNRKDAEDVLREIKKLIDENKKRNEEVLKKIEELLRELEKRLE

SEQ ID NO: 24837 - protein, 61 aa, Artificial Sequence
  Synthetic
SRLEKVIKEIKKTHEELERRFKKNSDEAEESLKRLEDELRKVVTDIERKLRDLERRVREAG

SEQ ID NO: 24838 - protein, 59 aa, Artificial Sequence
  Synthetic
EELITRLKKHVDDTAREVEELIKRHTEHNEKLRRDIKKLLEELKRKVDELRKEIETRTR

SEQ ID NO: 24839 - protein, 62 aa, Artificial Sequence
  Synthetic
SELEELIKRAEDTIRRLEREIDELIERHRRSAERLRETLKELIDRHRKSIEDVMRELKRRRG

SEQ ID NO: 24840 - protein, 56 aa, Artificial Sequence
  Synthetic
KEEIERLIKELEKKIKEVVKRIRDIDEDLKRKAKKVVDDLRELNERLERKAKEATK

SEQ ID NO: 24841 - protein, 60 aa, Artificial Sequence
  Synthetic
SEEERLRDHSRRVEELARRAAEKLRRHSEDVKRLITELIKLIEDVMKKIEDEVRDAEKRG

SEQ ID NO: 24842 - protein, 61 aa, Artificial Sequence
  Synthetic
ELKKRIDELHKRNKDKLDEISERLKRLLEENRKLIKEVEERLRKLLEDLRKLIEDVKRRLR

SEQ ID NO: 24843 - protein, 60 aa, Artificial Sequence
  Synthetic
DFEEEIRRNLKRVRDLAKKLEDLIRKHSEEVKRLAEEVKREIEEVIKRAKKKMEDVRRDG

SEQ ID NO: 24844 - protein, 61 aa, Artificial Sequence
  Synthetic
ELKKRADRLLDEHREELKRIEDRLRELLERNNRLLEDIDRRLKELLEDLRRVLKEIEEELR

SEQ ID NO: 24845 - protein, 61 aa, Artificial Sequence
  Synthetic
SEVERLLEDLRRLAKESDESLKKSHRELRKRHEEVRRTIEELLKDLERTVKEIKEELERDV

SEQ ID NO: 24846 - protein, 60 aa, Artificial Sequence
  Synthetic
EEDVRREIKRVLDTIRKLNEDWKRRNEESKRRLDKLLDDAKKAIDKIVEDVKKLLEDARR

SEQ ID NO: 24847 - protein, 61 aa, Artificial Sequence
  Synthetic
SEVEKLLRDLERLARRVREELRKSHEKLDKLARDSKKSIEDLLEDLRRIIEEIEEELDRRV

SEQ ID NO: 24848 - protein, 60 aa, Artificial Sequence
  Synthetic
REDVEREVRRIKREIKELLDRWRRANEEIAREIRKLNEEVKRRVEKILRDLEELLRRLRK

SEQ ID NO: 24849 - protein, 61 aa, Artificial Sequence
  Synthetic
SELEKLEKELKDLLDKIRRDLEKSLKENDELVKKIEEDLKDLLKKLDDRLEKVARDLKREK

SEQ ID NO: 24850 - protein, 60 aa, Artificial Sequence
  Synthetic
RETATKRVKEVLDKLRKMLEDLRRHNEENKRRNKEVLDELRKKAEDVLRRIDEALKELKR

SEQ ID NO: 24851 - protein, 63 aa, Artificial Sequence
  Synthetic
SVEEMETRLKEVADDLKKKIDEVLTRLEKLNRELTKRSRDMNRELERLNKEAEDRARDVLKRV

SEQ ID NO: 24852 - protein, 59 aa, Artificial Sequence
  Synthetic
RDEARKLLRDLERLIEEIKKTLDELLKHHKEELDRIDREHEELLRHHKKTLERIEEKID

SEQ ID NO: 24853 - protein, 60 aa, Artificial Sequence
  Synthetic
DRVEKVLREIEKRLRDHRKRLKDALDEIRKRIEEHEEKSERLNRESKKLLKDLEDMKRRG

SEQ ID NO: 24854 - protein, 56 aa, Artificial Sequence
  Synthetic
EEVVRRARELVKRLEEDHRRMVEEIRRTIKRAEERHKKSVEDNEKLLRDLRDRLEK

SEQ ID NO: 24855 - protein, 60 aa, Artificial Sequence
  Synthetic
SEVEKVLEDLKRLLDEHEKRSRELNKRSKKLADEARRINEELLRELKKLLDELKELKDRG

SEQ ID NO: 24856 - protein, 56 aa, Artificial Sequence
  Synthetic
KKFLDDMRRLLEELKERHERSERENRKLLRKLEEDSKRTNDESKKLLDKLRDDLEK

SEQ ID NO: 24857 - protein, 60 aa, Artificial Sequence
  Synthetic
DRVEEVLKRVEELVKRHDERLKELEDDLRRLIEEHLEKSRRLNKESEKLLKEILEVKRRG

SEQ ID NO: 24858 - protein, 56 aa, Artificial Sequence
  Synthetic
EEVVKTIDEIVKELRKRHEEVRKRLKELLDEMRERHERSVRRNRERLEKLLDDLRK

SEQ ID NO: 24859 - protein, 60 aa, Artificial Sequence
  Synthetic
SEVERVLRDVERLLEEHRKKSKEANDTSRELARRHKEESDRLNKKSEDDARRLEDVKRRG

SEQ ID NO: 24860 - protein, 56 aa, Artificial Sequence
  Synthetic
EDMVRRIREIVKKLKRDHEKSVEDNRRLLRELEERHRESVERNEDLLRRLEERARK

SEQ ID NO: 24861 - protein, 60 aa, Artificial Sequence
  Synthetic
DEVETVLRDLKRLLDEHRRRSEELNKRSEELLREHEERSKRLNERSEKLARELREMKKRG

SEQ ID NO: 24862 - protein, 56 aa, Artificial Sequence
  Synthetic
EEFVKRMDELLRKLEEDHRRSVRENEKLLEELRRRHKKSVDDNRRLLEKLKRDADR

SEQ ID NO: 24863 - protein, 60 aa, Artificial Sequence
  Synthetic
DEVEEVLRRIEELLTRHRKKSDDLNRRSEELAERHERTNRTLLEELRDLAKKLEDLKREG

SEQ ID NO: 24864 - protein, 56 aa, Artificial Sequence
  Synthetic
EEVVKRMRDLVRRAKEEHKKSVDDNRRTLKELHDRSKKTNDDSRELLKRLEDRLRK

SEQ ID NO: 24865 - protein, 60 aa, Artificial Sequence
  Synthetic
REAEEVLERIRRRLEEHLEDNERILREIKKRLDEHREKSKRVNDRSRELVERLLAVKREG

SEQ ID NO: 24866 - protein, 56 aa, Artificial Sequence
  Synthetic
EDIVREIRRIVRELHERSKDSNREVERLVRKLEDDHRESVERNRELLKKLEDDLRR

SEQ ID NO: 24867 - protein, 56 aa, Artificial Sequence
  Synthetic
RLEDVLREVREDLRRLNEESRKVLEENDKLDKDLNRRLKRLEEEARTEIKKVKDRL

SEQ ID NO: 24868 - protein, 60 aa, Artificial Sequence
  Synthetic
EDELEKRLTEVRKELEDRYRELIERSKDIIRRLEEEVRKLEKELRKVLEDLDRRAREATR

SEQ ID NO: 24869 - protein, 59 aa, Artificial Sequence
  Synthetic
SEREDIKRLIEEIRKLVDEAAKEIERNIEEIRRLVKELEELSKKHIDEAREILERLKRR

SEQ ID NO: 24870 - protein, 55 aa, Artificial Sequence
  Synthetic
ELVEEMERDVREVERALRRLLDKHRRVLEDVERRLRRALEENRRVLEEIEEDSRR

SEQ ID NO: 24871 - protein, 58 aa, Artificial Sequence
  Synthetic
KDEEATKKLRKAHEDSERHIKKLSEDTKKVHEESDRHIRKVSKETEDEARRIEKELRK

SEQ ID NO: 24872 - protein, 56 aa, Artificial Sequence
  Synthetic
EDTLEKIIEENKRLNDELAKENKEVIKENRKLNRELEERNKEVIDRMERILEETKR

SEQ ID NO: 24873 - protein, 58 aa, Artificial Sequence
  Synthetic
REEELKREMEKAHEESERHLEELSRKTRDVHRRSEEHLKRLHERTKEVVDRIVEELRR

SEQ ID NO: 24874 - protein, 56 aa, Artificial Sequence
  Synthetic
EETLRRVIEKNRKLNEDIAKRNEEVIETNKKLNEEIARRNEEAIKTARKIVEDTKR

SEQ ID NO: 24875 - protein, 58 aa, Artificial Sequence
  Synthetic
REKEVVDRLREEVRRVEEEVDRLNKELEEIARKVERELDKINEDYKRRLDKVREDIKR

SEQ ID NO: 24876 - protein, 56 aa, Artificial Sequence
  Synthetic
EETVKRILETARELLDRWKKEVDEIVKTLEELLDRWRKEVERVKRENDKLLEELEK

SEQ ID NO: 24877 - protein, 59 aa, Artificial Sequence
  Synthetic
DEKKVLDDLRRIVEKVKRDLDELLKDNRRVLREVEEELKRLNEELRRIAEEVTRELRRL

SEQ ID NO: 24878 - protein, 56 aa, Artificial Sequence
  Synthetic
EKLAEEVARELRRLLREAEETSRDTKRKLREVLREWRELVKKIVDEMRRLLEEIKR

SEQ ID NO: 24879 - protein, 60 aa, Artificial Sequence
  Synthetic
DLERLVEEIKRRLRELLKELHKKSKEIEEEIRRILKRHHELLERIVRRLEELVEEVKRRN

SEQ ID NO: 24880 - protein, 56 aa, Artificial Sequence
  Synthetic
KKLLEDLEREIEKVKKAARDDLRRLEEIVRDVERRLRENVKRLKEEADRVKEELEK

SEQ ID NO: 24881 - protein, 60 aa, Artificial Sequence
  Synthetic
EELERIKDEIRRILEELKREMEELTKESDRILRELERENEESAKRIKEILDELEKRVRDK

SEQ ID NO: 24882 - protein, 59 aa, Artificial Sequence
  Synthetic
ETLLRRLRESLEKLAKEVEDLLRKYERDVRELAKEDRKLNEELLKRVDDLAKEVRERLR

SEQ ID NO: 24883 - protein, 61 aa, Artificial Sequence
  Synthetic
SKLEEIERELRELERSNEEEDRKWDDTTRKLEEDNREKNREWKKLTKDIRERVERLIRDLK

SEQ ID NO: 24884 - protein, 58 aa, Artificial Sequence
  Synthetic
EEARRLDEELEKVLRELKKRNEDTERRDREVNKKLEKENRDSEKENRDVLREIERALR

SEQ ID NO: 24885 - protein, 58 aa, Artificial Sequence
  Synthetic
KKLEDLEEEIKKLLEELKERNERSAREDREILERLRDENRRTAEELDKSVREILKKTG

SEQ ID NO: 24886 - protein, 59 aa, Artificial Sequence
  Synthetic
DRKLKEVRDTLEKLREENRKLNEEWRRKSEELRRRNEKVNKEVRDRNRETIERVDRKAK

SEQ ID NO: 24887 - protein, 61 aa, Artificial Sequence
  Synthetic
EELERADRRLDRLLEESERDLDTIIRKLKKVVEELERTLEEAKRKAERTLEEIRRELKEAG

SEQ ID NO: 24888 - protein, 60 aa, Artificial Sequence
  Synthetic
VEDLLREIKELLDDLRRHNEKLHRELEELIKTLRRHNEKLLEDIERLLRELRKEVEKLRR

SEQ ID NO: 24889 - protein, 60 aa, Artificial Sequence
  Synthetic
DELRELRRELRKLLEDIRRRLEELTRENRDVLRKSREELERLLRRLKELLDRIRDSLRKR

SEQ ID NO: 24890 - protein, 56 aa, Artificial Sequence
  Synthetic
KDKMKKLLRDLERKLKRAEEESKRHIRENEKLTEEAARKVEELLKEIKRKLEELEK

SEQ ID NO: 24891 - protein, 55 aa, Artificial Sequence
  Synthetic
SVEDTIRELEKRIRDLNREMERLNRESVEKIKRLNEKVRREIEDILREIKRLAEN

SEQ ID NO: 24892 - protein, 55 aa, Artificial Sequence
  Synthetic
ESLRRKLKKLADEHRETVDRMHEKNRKLADDHRDSVRKLEERIKRLTDRLREERK

SEQ ID NO: 24893 - protein, 56 aa, Artificial Sequence
  Synthetic
SEVEETLKRLEEVIREAEKTIDDSNREIEEAVRRIKTTIEKSNRDLKDLVEKLKRL

SEQ ID NO: 24894 - protein, 55 aa, Artificial Sequence
  Synthetic
EDVRRRVKEIIDKLERKIEESERNLKRIIEDLEREMRESEERVKEIIRDLERTEK

SEQ ID NO: 24895 - protein, 57 aa, Artificial Sequence
  Synthetic
SEIDEVLKRVEDSVREIERKLEEIERRLRRLNEEVKKRLDEIEEEIRRLVEELRRRN

SEQ ID NO: 24896 - protein, 59 aa, Artificial Sequence
  Synthetic
DDRLREIEKRIDDLNKKVRDEVERLKREADKSLETIKRLVEELKEKLDRLLEEVREEVR

SEQ ID NO: 24897 - protein, 59 aa, Artificial Sequence
  Synthetic
STRERLKKVLRDVERANKELSDRNKRVLEKLRRDVERLSRENEKLVRELEEAIKDLRRK

SEQ ID NO: 24898 - protein, 55 aa, Artificial Sequence
  Synthetic
EDLRREVEEVLKRIRDSNRDNRRKNEKVKKDIREILRRNEKRNREVNEKIRRDET

SEQ ID NO: 24899 - protein, 60 aa, Artificial Sequence
  Synthetic
KETEEVKDVLRRVRKRIEDLSKKNKDDLRRVEERNKELNERVKRLLEELKRRVDDLKRKG

SEQ ID NO: 24900 - protein, 58 aa, Artificial Sequence
  Synthetic
EDLERVEEDVRRVIKEIRDLARENHEENRDVIRRIRESNKRTEDEAREVLDRIRKTAT

SEQ ID NO: 24901 - protein, 56 aa, Artificial Sequence
  Synthetic
KEREEAEEMLKRLEEELRRLLEESEKIIERSERHLEKLLKDAEDEIRRVKEELDKI

SEQ ID NO: 24902 - protein, 59 aa, Artificial Sequence
  Synthetic
REEIRRLIERLRELLEEIARRIEKTNRELEELNKRLADDIKRLIDELERVLREVEERSR

SEQ ID NO: 24903 - protein, 56 aa, Artificial Sequence
  Synthetic
DEVETLLEEARKVLEELRKKIKELNEDSKRVLEELEKRIRDLDRRSTEVLRRLEES

SEQ ID NO: 24904 - protein, 55 aa, Artificial Sequence
  Synthetic
EELEDALRKIRKAVEELKKDVRRTLEEIKKEVKRLIEEARRSLDKIRRDVEKRDE

SEQ ID NO: 24905 - protein, 56 aa, Artificial Sequence
  Synthetic
EEVKRLVDDLREVTKENEKRARDLDRDSKRVSEENARKIETLNRDNERVNKELADS

SEQ ID NO: 24906 - protein, 55 aa, Artificial Sequence
  Synthetic
EKLDEDLERLERRNRKINEDAKTTLREIERENEELNKRLEETLRRSEKHLRDRRK

SEQ ID NO: 24907 - protein, 61 aa, Artificial Sequence
  Synthetic
REVEKLIKELEDLNRDHARKVKELIAELEKLLRDHAEKVRKLIEEARKTLEDLREIVERKG

SEQ ID NO: 24908 - protein, 55 aa, Artificial Sequence
  Synthetic
KDVREMIRRSEENLKRLNEEVKRAIRKVEEDLKELNKRARDVLEELRKRVEDTFR

SEQ ID NO: 24909 - protein, 57 aa, Artificial Sequence
  Synthetic
SEEEELEKRLRDSEREIEKWLRDLERVIEEVAREDKKIHEELEKILEDVKRELDKLG

SEQ ID NO: 24910 - protein, 59 aa, Artificial Sequence
  Synthetic
SKVVEKLVEDLRRINEEAKRRLERLKEELRKVLKDYKDEIDKLVEELKRTLDEVRKKAK

SEQ ID NO: 24911 - protein, 57 aa, Artificial Sequence
  Synthetic
DEEEDVRRTLEKVERDVERIDEDVERELRKVEEDDKRLHKELSEVVEKVERDIRRTG

SEQ ID NO: 24912 - protein, 59 aa, Artificial Sequence
  Synthetic
KKKLEELKERLKEALKRHEDKVRELKKELKKILDDYTEDVKRIKERLKRILEEIRRRKK

SEQ ID NO: 24913 - protein, 57 aa, Artificial Sequence
  Synthetic
SSEEDVKRELERVRREDERIHRDLERVLEESERRVETWDRDAKRTLEKVEEDLRRDG

SEQ ID NO: 24914 - protein, 59 aa, Artificial Sequence
  Synthetic
EELLEELKRRLKEILDRYRREAERLKRENEEMNKRHRERLEELKKRLKELLERMKEARK

SEQ ID NO: 24915 - protein, 57 aa, Artificial Sequence
  Synthetic
STEEDVRRVMKKVEDDVREINRDLERDLRRVEEAVERLDRDAKREIDRLREEIDREG

SEQ ID NO: 24916 - protein, 59 aa, Artificial Sequence
  Synthetic
EKFAEDLKRKLKKVLDEHRRRIEELKRELEEVLERHARELKRLKDELKKLVDDIRRRRK

SEQ ID NO: 24917 - protein, 57 aa, Artificial Sequence
  Synthetic
SDEEDVERELKRVKDEVDKINEDVRRELRKSEEDVERWDEDLERVVRRVEEEVRKTG

SEQ ID NO: 24918 - protein, 59 aa, Artificial Sequence
  Synthetic
KKVLEKLKKDLRDALKRHRDRVEKLKEENRKLNEDHKKTLEDIKEELKRLLDELKETRR

SEQ ID NO: 24919 - protein, 57 aa, Artificial Sequence
  Synthetic
SDEEDVERELERVKRDVERLDEDAKRVLDEVRKAVEEINRDVERDLRRVEEEIKKTG

SEQ ID NO: 24920 - protein, 59 aa, Artificial Sequence
  Synthetic
KEKLKELKERLKRLLDEHRRELKRLKDELKKALDDHKRKVDKLKKELKDILKKIRDDRR

SEQ ID NO: 24921 - protein, 57 aa, Artificial Sequence
  Synthetic
DDEDDVRRVLRRVAEEVRKLDEDLKRVLKESKERVKRWNDDAKRRLDKVREDLKRKG

SEQ ID NO: 24922 - protein, 59 aa, Artificial Sequence
  Synthetic
KKVLEELKKRLEDLLKRHEEEVRRLKEENKKLNDDHRRELERLKKELTDLLKRLDDERK

SEQ ID NO: 24923 - protein, 57 aa, Artificial Sequence
  Synthetic
SLEEDVKRVIDRVREAVKKINDEVEKELRKSEKAVEDWNRRLEEIHDRARRELEKAG

SEQ ID NO: 24924 - protein, 59 aa, Artificial Sequence
  Synthetic
KDKLEELKRRLKRLLDEHRKRVEELKEENKRLNKEHEKKVEDNVRRVRELLKRVEDRRR

SEQ ID NO: 24925 - protein, 60 aa, Artificial Sequence
  Synthetic
SEVEEIVKKLEELLRRWEKTVRDIVEELKRLLEEIEKLSRETKERLKKILEDVKRLAEEG

SEQ ID NO: 24926 - protein, 55 aa, Artificial Sequence
  Synthetic
DELEDIARRVKEELDRLNEELERIARKVKEDLKRLLEDNKRVLDEVKERLDRIRK

SEQ ID NO: 24927 - protein, 59 aa, Artificial Sequence
  Synthetic
SEIEDIVRRLEELLERWKRRVDKAKERNKRLLEKWAKEVEDIKRELEKLLEDVRRLKEE

SEQ ID NO: 24928 - protein, 55 aa, Artificial Sequence
  Synthetic
DELEKIVEDVERELDKINEDYNRVLKRVEEELDRLNEDLNRVAKRVKDALRKIEE

SEQ ID NO: 24929 - protein, 59 aa, Artificial Sequence
  Synthetic
SEIEKVVEEAKKLLKRWEDEVRKHDKELKEVLDRWKKEVDDIKRRLEELLREVRRLKEE

SEQ ID NO: 24930 - protein, 55 aa, Artificial Sequence
  Synthetic
DELRKIVEDVERELDRLNDENRDSLRRVVEALEEINKDLNRDVKRVKDELDKTRK

SEQ ID NO: 24931 - protein, 59 aa, Artificial Sequence
  Synthetic
SEVEEIKKELKKLDEENKRVIDRIVREIERLNEENERVARKVIKEIEELLRKLEKLRRD

SEQ ID NO: 24932 - protein, 55 aa, Artificial Sequence
  Synthetic
EDLRRVLKESEDRNRKLLEDLERKVRDVKRRDDELLKRAREALKRVKDEIEKIRK

SEQ ID NO: 24933 - protein, 59 aa, Artificial Sequence
  Synthetic
SEVEDIIRRIKELDDRNERKVRELVKTNEKLLRDLHEKSKRIVKEMRELLKEIEDLARR

SEQ ID NO: 24934 - protein, 55 aa, Artificial Sequence
  Synthetic
EELKRVIDESKKRNEKLMRDYEEISKKVHEDVERDAERLRRIAKEVEEELERVRK

SEQ ID NO: 24935 - protein, 59 aa, Artificial Sequence
  Synthetic
SEVEKIKEDLKRLLDEVRKKAEELKRENRELLRRLHELSKKIIRELEKLLEELADLVRK

SEQ ID NO: 24936 - protein, 55 aa, Artificial Sequence
  Synthetic
EDLERTIREVEKELRRLLEDYRRESKKVHEDIDEDRRRLEDAVREVEKEIEKVRR

SEQ ID NO: 24937 - protein, 60 aa, Artificial Sequence
  Synthetic
SEVERIKEDIKKSNEDIRRTAEEIKERIKKSNKEVEDEVREIKERIKRILDKLKRVKEEG

SEQ ID NO: 24938 - protein, 59 aa, Artificial Sequence
  Synthetic
KSVVDDLERVMKESEERVKRIIDDLERTLRESEKNLKRIIDDLERVMREAREAIDRLKK

SEQ ID NO: 24939 - protein, 60 aa, Artificial Sequence
  Synthetic
SEDDELRRRLEELKRRIEDLIRKLREVLKRSEDELRKILRELREVDKDLRRRIEELIKDI

SEQ ID NO: 24940 - protein, 56 aa, Artificial Sequence
  Synthetic
EDEAKKRLEEILRRAEELLERLKRTNERVNRKVREDMKRAKEHAKRLLEEAEELAR

SEQ ID NO: 24941 - protein, 57 aa, Artificial Sequence
  Synthetic
DEVEELIKEVEKVNEDAARESEKRNRELKKMLERVKRENKRLIRELKELLDDARRKN

SEQ ID NO: 24942 - protein, 59 aa, Artificial Sequence
  Synthetic
REVLKKLEEVLRESKKRLKEWNDRNKKTLDDIRREIEKSKKEHEDALRRIEEELKKTET

SEQ ID NO: 24943 - protein, 57 aa, Artificial Sequence
  Synthetic
SELEKLVKELRDLNEKVARDSKRLNDKLEEVLDRLRRRNEELIKRLEEVLEDVERKN

SEQ ID NO: 24944 - protein, 59 aa, Artificial Sequence
  Synthetic
KELLDRLRKMLKESRDSLRKLNKENEETLRRIKKKLDESKRKHEEVLKDIKRRLEELSR

SEQ ID NO: 24945 - protein, 57 aa, Artificial Sequence
  Synthetic
DEVERIIERLRRVNKRVREENERLIKEIEDLITEIAKRSRDLNRELDKTLKDVRRKN

SEQ ID NO: 24946 - protein, 59 aa, Artificial Sequence
  Synthetic
EEVLRRLEKVLRESRKSLEDSAKKHKDVLDEVKKTLKKLNDENREVLKRIKKELDKTRT

SEQ ID NO: 24947 - protein, 56 aa, Artificial Sequence
  Synthetic
SEVEKLIEDMKKVAKELADESEEHIKRAEEVIDRLAKEVEKHDRDVEDTIRRLEES

SEQ ID NO: 24948 - protein, 59 aa, Artificial Sequence
  Synthetic
EEVKKRLREMLEELRRRLERLKDKNKEVLDRLEEKLRKLEKENDDSLKEAEDKLRERER

SEQ ID NO: 24949 - protein, 56 aa, Artificial Sequence
  Synthetic
SEVEKLIEDIERIIRTLAEEVRRHDEDARRVLEDLARKVRKHNEDVKKVLEDLRES

SEQ ID NO: 24950 - protein, 59 aa, Artificial Sequence
  Synthetic
EEMKERLRRMLKRAEDELRRLEEENDRVVERLERELRRLTEDNKRTLKKIEEDLRRREK

SEQ ID NO: 24951 - protein, 56 aa, Artificial Sequence
  Synthetic
DEVRDLIRRLEETVKRLADEVREHDKRARDILRELKKEVKETNRRSEKVADDLEKS

SEQ ID NO: 24952 - protein, 59 aa, Artificial Sequence
  Synthetic
EEVKERLKKVLEKLKRDLEKLKEDNRRVLKELEEELRKIKEELDKSLDDLRKRLEDRKK

SEQ ID NO: 24953 - protein, 60 aa, Artificial Sequence
  Synthetic
SLEEKFRRVLEESKESLERLKRKVEKVLRESEERLKRWLDKVKKVLEEVDDALRRLKDRL

SEQ ID NO: 24954 - protein, 59 aa, Artificial Sequence
  Synthetic
KEIVERLIEELKKLNKELADRLEEIIRRLEEINERLRERIERIITRLRRLLEELEREAE

SEQ ID NO: 24955 - protein, 60 aa, Artificial Sequence
  Synthetic
SEDEDLKRVLDEAEKRLKDLLDDLRRALKRSEDELRKNNEDLERVLKRVEERLKELLDRV

SEQ ID NO: 24956 - protein, 59 aa, Artificial Sequence
  Synthetic
REIVEEIKKRIRDLLRELEKKIEELKTTSERLNREHHKKIEDIKKEIEDLVRELEKKVK

SEQ ID NO: 24957 - protein, 60 aa, Artificial Sequence
  Synthetic
SLREKLEEVLRRIEEALERIREEVEKVLRDSRDDNRRVLKELKELLERVREALEDLLRKV

SEQ ID NO: 24958 - protein, 59 aa, Artificial Sequence
  Synthetic
DKIVKEIIEELEKLLRDIKKRARELIEESKRINEDNNRRAEEVAEEIRRLLEELERKLR

SEQ ID NO: 24959 - protein, 60 aa, Artificial Sequence
  Synthetic
SLEEDVKRVLREAEEELKKNNERLRKVIEDSKRDNDRVLDELRKVLEDIEKALRDLLREV

SEQ ID NO: 24960 - protein, 59 aa, Artificial Sequence
  Synthetic
DKIVDEVRKEIEKLVRDHHKRIKDLKDDLKRLNDENNKRAKEIIDEMKRLLEEIEKRVR

SEQ ID NO: 24961 - protein, 61 aa, Artificial Sequence
  Synthetic
KDVEDIKRRIEELNKKLKEKIERIKKRIKELNEEAAKKVEEIKERLKRLLDEIRELVRRDG

SEQ ID NO: 24962 - protein, 59 aa, Artificial Sequence
  Synthetic
DSLRKRLEEVLRESKKTAEDLKRDLRRALEESKKNLKRLLDEVRKVIDEIRKALEELER

SEQ ID NO: 24963 - protein, 61 aa, Artificial Sequence
  Synthetic
SEVEKIKKDIKDLNDDARRRLEEIKRRLEKLLKELEEKHRELKKELKKLLDEVRDLVRREG

SEQ ID NO: 24964 - protein, 59 aa, Artificial Sequence
  Synthetic
DRLREDAERVLRESKKNLDELEKDVRRVIKRIEDEARRLNEDLKRMLERIKRELEKLEK

SEQ ID NO: 24965 - protein, 60 aa, Artificial Sequence
  Synthetic
SEEERLEEVLKRVETELRRLKRELEKVLRESEEALREIIKKIEDAVRDNAEKVKKLSRTV

SEQ ID NO: 24966 - protein, 55 aa, Artificial Sequence
  Synthetic
RRVEKELEDLLRTATKVLEDLKRDLKRLNEETEEVVKTLEDSHRRSNEEVERRVR

SEQ ID NO: 24967 - protein, 60 aa, Artificial Sequence
  Synthetic
REREELEEVLERSKRELERLVEEIKRALDESRRRLEEIEKRIEEVIRRNKEEIKKLSRRV

SEQ ID NO: 24968 - protein, 55 aa, Artificial Sequence
  Synthetic
EKLKEELKELNRESRKVVEDLREKLDRLNKDTERVVRELEKEHRKSNEEVRKTVK

SEQ ID NO: 24969 - protein, 61 aa, Artificial Sequence
  Synthetic
DEEEELKEDIKRILEELRRLAKEHEELNRRINKELEDLVREHKKRLEDALKRLREIVRDRG

SEQ ID NO: 24970 - protein, 55 aa, Artificial Sequence
  Synthetic
EELEKVLKEAEDDVERIKKRLKRINDESRKHVERLKEELDRADKRIEDEVEKLKK

SEQ ID NO: 24971 - protein, 61 aa, Artificial Sequence
  Synthetic
RIEERLKRVVDKVDDTLRKSEKHLEDVVRDADRDIDRNRRENEKVVKEAEDILRRLVEEAG

SEQ ID NO: 24972 - protein, 59 aa, Artificial Sequence
  Synthetic
EDKVRELEEEAERLLDELRRKNEEAVRRIKKLLDDLNKHSEETIRRIKKLLKELEDKTR

SEQ ID NO: 24973 - protein, 57 aa, Artificial Sequence
  Synthetic
STEEKLKELKKEADKLLKELDKELRDNLRRLRKIVEELKKENRDLTRESEEVLKRLN

SEQ ID NO: 24974 - protein, 59 aa, Artificial Sequence
  Synthetic
DKDVKKLIEEIRRILEKAREEVERLSRDSKRVAEELRKRHKELIDRNKRVLEELKRRRD

SEQ ID NO: 24975 - protein, 60 aa, Artificial Sequence
  Synthetic
SEVEEVARRSRKLNDDLKKIIEELIRRSRKINDELRREIERLIRESRKLNRELEELKRRG

SEQ ID NO: 24976 - protein, 56 aa, Artificial Sequence
  Synthetic
EDKVRRLNEENKESLRRLERELEKLNKENEDSLRTLEELLRELNKENKRSLDELRK

SEQ ID NO: 24977 - protein, 56 aa, Artificial Sequence
  Synthetic
SLVEEVEERVKKLHDENRELDRKSKRDVEEVHKKNEKLIKDVERTVREMIRKLREL

SEQ ID NO: 24978 - protein, 56 aa, Artificial Sequence
  Synthetic
EEELRRLEEELRRSIKESREELRRLEDELRRSIEKLEDALRRLAKELDEVIKDLKD

SEQ ID NO: 24979 - protein, 56 aa, Artificial Sequence
  Synthetic
SLVDEVRRRVDELHKDNKRLDDESEKKVRDAHRENERLDDESRRKVKEAIRKLEEL

SEQ ID NO: 24980 - protein, 56 aa, Artificial Sequence
  Synthetic
KESLDRLAEKLKKSIKESEDILRELEKRLRDSIRESRKILEDLRRELEEVIKRLED

SEQ ID NO: 24981 - protein, 56 aa, Artificial Sequence
  Synthetic
SLAEEVEKRVRDLHRKNEELDRESEKKVRDMDRKNKELIKRAEEEVKKVIDKLRKL

SEQ ID NO: 24982 - protein, 56 aa, Artificial Sequence
  Synthetic
EEKLRELARRLKESIRESRERLRRLEKELEDSIRELRRAIDTLTKRLEKAIEELER

SEQ ID NO: 24983 - protein, 56 aa, Artificial Sequence
  Synthetic
SLVEEVERRVRKLHEENKKLDKESEDKVREANRRNEELIKKVTESVRRMIEKLRRL

SEQ ID NO: 24984 - protein, 56 aa, Artificial Sequence
  Synthetic
EEELRRLADELRRSIEESERILKKLEEELRRSIEELRRALEELDEELKRVIRELER

SEQ ID NO: 24985 - protein, 56 aa, Artificial Sequence
  Synthetic
SLVEEVKKRVDDLHKRNRELDDRSEKMVRKANEENKELDKKSKEDVDRLIERAERL

SEQ ID NO: 24986 - protein, 56 aa, Artificial Sequence
  Synthetic
EEELRRLAEKLKRSIEESREILKELERRLRESIRRSREILKRLKEELERAIERLRR

SEQ ID NO: 24987 - protein, 56 aa, Artificial Sequence
  Synthetic
SLAEEVEKLVRDLHRKNKELDRRSKKTVEDIEREARELDKRSKEEVERMIKKLREL

SEQ ID NO: 24988 - protein, 56 aa, Artificial Sequence
  Synthetic
EDKLRELEKELRDSIRESREILERLERRLEELIRRSKRILEELERELEEVIRELRR

SEQ ID NO: 24989 - protein, 56 aa, Artificial Sequence
  Synthetic
SLDDDVEKKVRELDKRNEDLDRKSEKEVEKVHRKNKRLDDESEKEVKRMIEELKKL

SEQ ID NO: 24990 - protein, 56 aa, Artificial Sequence
  Synthetic
EEELRRLAEELRESIERSRERLKELERRLRESIARSREILEELERRLKRAIEDLER

SEQ ID NO: 24991 - protein, 56 aa, Artificial Sequence
  Synthetic
SLAEDVEEKVKELNRRNKKLDDESKEMVKRAHDRNRELDERSKDRVRRVIEKLRRL

SEQ ID NO: 24992 - protein, 56 aa, Artificial Sequence
  Synthetic
KEKLEELAERLRKSIEESRDILRRLEKELRDSIKRSEEILKELTDRLRKVIKDLRD

SEQ ID NO: 24993 - protein, 56 aa, Artificial Sequence
  Synthetic
SLVEEAERRVRELIKELERLDDRSREMVKEMHERNRELIERVEKRVREVIEELRRL

SEQ ID NO: 24994 - protein, 56 aa, Artificial Sequence
  Synthetic
EDDLRKLAEDLKRVLKRSRDILRKLEEDLRRSIRELEEALRKLEEDLRRAIEELET

SEQ ID NO: 24995 - protein, 56 aa, Artificial Sequence
  Synthetic
SLKDDVEKKVEDLKKEAKDLDRESDKKVKTAHKRNEELDRKSADDVRKLIRKLEKL

SEQ ID NO: 24996 - protein, 56 aa, Artificial Sequence
  Synthetic
EEELKRLAEELERLIRDSRRILEELKRELKRSIEESRKILEDLERELEKVIRELKR

SEQ ID NO: 24997 - protein, 56 aa, Artificial Sequence
  Synthetic
SLAEEVERDVKRLDEENKRLDDRSRREVEKMDEENKKLIEDARREVREMIEKLKKL

SEQ ID NO: 24998 - protein, 56 aa, Artificial Sequence
  Synthetic
DEKLKELAKRLRDSLERSKEELKKLEEELRKSIKELEDALKKLEEDLRDVIRKLEE

SEQ ID NO: 24999 - protein, 56 aa, Artificial Sequence
  Synthetic
SLVEDVERKVRELDKRNRDLDRKSKRKVEEADKENRKLDEDSERKVRELERKATEL

SEQ ID NO: 25000 - protein, 56 aa, Artificial Sequence
  Synthetic
EESLRRLEEELRKSIKESKEILDELRKELEKSIRESKERLKELEKRLEELIRELKR

SEQ ID NO: 25001 - protein, 56 aa, Artificial Sequence
  Synthetic
KLVEDAEELVRRLDEENKRLDDDSKRRVEEANRENEKLIKEIEDEVRKMIKKLRDL

SEQ ID NO: 25002 - protein, 56 aa, Artificial Sequence
  Synthetic
EEELRKLAKRLKDSIDRSRKILEELERELRRSIDELRRALEELTDELRKVIEELRK

SEQ ID NO: 25003 - protein, 56 aa, Artificial Sequence
  Synthetic
SLAEEVEKEVKKLDEENRKLDRDSTETVKELNKKNERLDRESKRKVDEVIEKLERL

SEQ ID NO: 25004 - protein, 56 aa, Artificial Sequence
  Synthetic
KEKLDELADELKKSLDRSRRILERLEEELRRSIRRSEDILRRLKEELERVIRELRR

SEQ ID NO: 25005 - protein, 59 aa, Artificial Sequence
  Synthetic
SVDEEVEKLLKEHEERIRELIKEVEKLNREHAKRIEELIRKLKETNKRIADKIRDLKRQ

SEQ ID NO: 25006 - protein, 56 aa, Artificial Sequence
  Synthetic
EEKLRTIARRIKELNDRFKRAIDESRKHIEELNRRLEKVVEDSRRHLEELADEVRR

SEQ ID NO: 25007 - protein, 59 aa, Artificial Sequence
  Synthetic
SVLEELKRLLDEHRERLERLIRELRKLNEDHDRRIKELIERLKKLNEDIAKRIEDLKRD

SEQ ID NO: 25008 - protein, 56 aa, Artificial Sequence
  Synthetic
EDVLRKIEEDIKRLNREVEKAIRESEENIKRTNKRFKDELRKSEKHLEELVKRFRD

SEQ ID NO: 25009 - protein, 59 aa, Artificial Sequence
  Synthetic
SVLEEVTKLLKDHEDRIREIIKRLRKLNRDIDERIKRLIDEVRKKNDDIRRKIEELKRR

SEQ ID NO: 25010 - protein, 56 aa, Artificial Sequence
  Synthetic
EERLKRLREELEKLNRDVERVIKESKENLDRTVTEAKRELKRSEDNLERLAREFER

SEQ ID NO: 25011 - protein, 59 aa, Artificial Sequence
  Synthetic
TEEEILRRVERDLERLNRELERIVREVEKELKKINDDYERVLKKVKDDIDRIREELDRQ

SEQ ID NO: 25012 - protein, 56 aa, Artificial Sequence
  Synthetic
DKELEELLKRWEEDVKRIVEEVKKLLDEWRERVKRAKDENEKLLRDLEKLVEDLAR

SEQ ID NO: 25013 - protein, 59 aa, Artificial Sequence
  Synthetic
SKEDVLREVKRELKRLLDDNRRMLEEVEEAARRLNKDYNDVLKEVEEEIEKIIRELEKK

SEQ ID NO: 25014 - protein, 56 aa, Artificial Sequence
  Synthetic
EEDLKRLLDEVRRLSEKTKEDLERILRKWKEDVERAKERNRRELERLEREIKELAR

SEQ ID NO: 25015 - protein, 57 aa, Artificial Sequence
  Synthetic
ELDKIVEEVRKALREILEDYKRFSKEIHDRDKELADRLREILKDVKRAVDELIKKLS

SEQ ID NO: 25016 - protein, 60 aa, Artificial Sequence
  Synthetic
VEDVVRKLRELLERFRKKAEDLKEENKRINEENERKIREIVKTLRKLLDELREKLERTKK

SEQ ID NO: 25017 - protein, 57 aa, Artificial Sequence
  Synthetic
SLEDTLRKVDKDLKDNMRRLEETAEKVRRDIDRDEERLRRISEELHRRIEELIKRLS

SEQ ID NO: 25018 - protein, 60 aa, Artificial Sequence
  Synthetic
VEDVVRDAKRLLDEHHDLARKIVEDLRRLLEDLHRKSKKSVEDNERLLKRMEEILRETER

SEQ ID NO: 25019 - protein, 56 aa, Artificial Sequence
  Synthetic
SELEEVARRVEKLLEKHKEDLKRLLEKSEEDLRRAEEEVKRLLEEIREELDRLRKR

SEQ ID NO: 25020 - protein, 55 aa, Artificial Sequence
  Synthetic
EEIKKVRKKVEDVHEESKRLNEENRRRTKEVSDKIREIIKEIRKEIKKASDELEK

SEQ ID NO: 25021 - protein, 56 aa, Artificial Sequence
  Synthetic
DELERAVEEVEKRLREHLERIKRLLEESRELLKRHEKLLEDVLRRIRELLKRAEDR

SEQ ID NO: 25022 - protein, 55 aa, Artificial Sequence
  Synthetic
ELIKRVKERVKEAHKRSRELNERNRRETEKMHKKSRDLLRKIREEVDRMSDKLRK

SEQ ID NO: 25023 - protein, 56 aa, Artificial Sequence
  Synthetic
SEEELLRELEKKLRELRRKVDETLRDLRRRLKELEEDHRRTLEESERHLREVEKKL

SEQ ID NO: 25024 - protein, 55 aa, Artificial Sequence
  Synthetic
EKLDRRVEELIKEIEELLREVEKLVEDLIRTIKKLNDDLREDNKRLAKEMEDRAR

SEQ ID NO: 25025 - protein, 61 aa, Artificial Sequence
  Synthetic
SAVEDLEREVRKLIRDLEDLIRRLEERNKRIAEEIEKLNEELNRENKRIADEIRRIKDERG

SEQ ID NO: 25026 - protein, 56 aa, Artificial Sequence
  Synthetic
EEALERLKRELRKLAEELKKVLKRSRDHLKEVKRRHDENIKRSDDHLKRVADEARK

SEQ ID NO: 25027 - protein, 61 aa, Artificial Sequence
  Synthetic
SVAEELEKDIRRIEEEIKELLERHRELNERIVREIEDLNRKLNEMNKRVVEELRKVKRDRG

SEQ ID NO: 25028 - protein, 56 aa, Artificial Sequence
  Synthetic
DRVLKKLEKRLRELEEEAKKLLKESKEHVDEVRKRHEENIRRSEEHLRRVLEELRR

SEQ ID NO: 25029 - protein, 60 aa, Artificial Sequence
  Synthetic
SVVEELERRIEEIAREIEELNERHNRKNKEIADRIRDLNRRLNEANKKIVREIEEIKRRD

SEQ ID NO: 25030 - protein, 56 aa, Artificial Sequence
  Synthetic
SRVLDKLRKELDDLRRRHEENVDRSRKHLEEVRKEHEENIKRSERHLEEVKKEAER

SEQ ID NO: 25031 - protein, 61 aa, Artificial Sequence
  Synthetic
SVVETLEKRVRELIETLERLIERLDRENKRVAEEIKRLLDEHDKTNKEIVERIRDIKRREG

SEQ ID NO: 25032 - protein, 56 aa, Artificial Sequence
  Synthetic
SRVLRKLEEELRKLEEKLRKLLKDSEDHLREVLERAKRVLDDSRRHVDEVRREAEE

SEQ ID NO: 25033 - protein, 61 aa, Artificial Sequence
  Synthetic
SVMEDLERRIREIIKEIEKLLEDLKRENRRVAEEIERLNREHNELNKRIAEEIERIKRRRG

SEQ ID NO: 25034 - protein, 56 aa, Artificial Sequence
  Synthetic
SRVLKKIEDELKKLEDKAREVLKRSRDHLKKVEDDHRENVRRSEEHVKDVLRRFEE

SEQ ID NO: 25035 - protein, 61 aa, Artificial Sequence
  Synthetic
KVLEDLDRDIKRIIDEIRRLNEELNREIEEIKRRIKRLNEEHNERNKRLAEEARRIKDERG

SEQ ID NO: 25036 - protein, 56 aa, Artificial Sequence
  Synthetic
DEVLKRLEEKLERLREEHERNAREIRKELEKLEKEHRENVERSRRHVERVEREFET

SEQ ID NO: 25037 - protein, 61 aa, Artificial Sequence
  Synthetic
SVVERLKEIAEEIIRRIEELNKEHNKRNREIAETIERLNREHNELNKTLVREMKEIKRDKG

SEQ ID NO: 25038 - protein, 56 aa, Artificial Sequence
  Synthetic
SEVLKKIEEDLRRLLRKHEENSKESEKHVEEVEERHRRNAEDSKRHVEKVKEEVDR

SEQ ID NO: 25039 - protein, 59 aa, Artificial Sequence
  Synthetic
STEEVLKEIRDRLEELKREAKKVNDDTRERLKELEERNRRANEESKRRLEELERRVEER

SEQ ID NO: 25040 - protein, 59 aa, Artificial Sequence
  Synthetic
ERLLRELRRKLKEVEDTIRELNERLRKRIREIEEEVRESNERLRKKLREILEEIKETEK

SEQ ID NO: 25041 - protein, 59 aa, Artificial Sequence
  Synthetic
SVVEEIDKIIKRIADRVRKIIEDLERLNKEIADLLRRIIEELKRLNDRIREEVDRLRRR

SEQ ID NO: 25042 - protein, 56 aa, Artificial Sequence
  Synthetic
EKVLEDVERKLERLKREVRRVLEESRKRLKEWKDRAREVLEESKRSLEEISRRLRE

SEQ ID NO: 25043 - protein, 59 aa, Artificial Sequence
  Synthetic
SADETLRKVVEEVARKSEKLNKELEKVNKDLARAVEELIEELKDVITKIEERAKRLKDR

SEQ ID NO: 25044 - protein, 56 aa, Artificial Sequence
  Synthetic
ERVLEEIRERIERLNKRNKEVLDRSEESLRRLAEKLRRVIERVEEKLRKIEEDLKT

SEQ ID NO: 25045 - protein, 61 aa, Artificial Sequence
  Synthetic
DKEDAIRTAEKRIRDSERENEKVDEDYRRELKRSEDKNEKADKEYKRRIEELVRRLLETRG

SEQ ID NO: 25046 - protein, 56 aa, Artificial Sequence
  Synthetic
EDTLRKLVDDIEERNRRIIEELKRHLDKLREDNERVIEELKRHLEEVAREVERRRK

SEQ ID NO: 25047 - protein, 56 aa, Artificial Sequence
  Synthetic
SEKEEAEKLLREHHEKIKRLKEESKRINDENRKRIEELKRRSREINKELEEKVRRN

SEQ ID NO: 25048 - protein, 56 aa, Artificial Sequence
  Synthetic
EDTVKRIEDELKKNLDDLRRVLEKSKDDNRKLLEDLERELRESKKDARRLLEEVRK

SEQ ID NO: 25049 - protein, 56 aa, Artificial Sequence
  Synthetic
SKEEELEKLLREHHEKIKRLKEESKRINDRIRRTVEELIKESEKINRDINDTVRKN

SEQ ID NO: 25050 - protein, 56 aa, Artificial Sequence
  Synthetic
EDSVERIKRELERNLDDLRRVLKESEDDLREILRRLKEVLEESERDLERVEREVRK

SEQ ID NO: 25051 - protein, 59 aa, Artificial Sequence
  Synthetic
SELEELLERLERLIEENRRELEELIRELKEESDRTREELKRLIDRLKEKIDRVLKLKED

SEQ ID NO: 25052 - protein, 56 aa, Artificial Sequence
  Synthetic
KDVLKEARERLRKLHEETKEAKKDLDRILDENEKEVKEVKKRLEDLLKELRDRLRK

SEQ ID NO: 25053 - protein, 57 aa, Artificial Sequence
  Synthetic
SELEEVLKRIREEAERLMRRNEETLRRVKKTIEDLLRRNEKRLEDVKREADEIEKRK

SEQ ID NO: 25054 - protein, 55 aa, Artificial Sequence
  Synthetic
ERVKEEIERIEKRVREVHEEVNKRIEDLRREYRKEHKRVEDEIRRILREVREKRR

SEQ ID NO: 25055 - protein, 56 aa, Artificial Sequence
  Synthetic
SEKEEVKKESEKLSRDTKKRSDEVHKEIKRLTDETERELREVEKEIERLAEELRRQ

SEQ ID NO: 25056 - protein, 59 aa, Artificial Sequence
  Synthetic
EKVLEDELRENKKENKDLKERHDRTLEEVERTNRKVKEELRRVLRRVEESVREVAERAT

SEQ ID NO: 25057 - protein, 61 aa, Artificial Sequence
  Synthetic
SKEETIEKRVEELKRENDEKVERIKREIEDLIRRNKELLERIKKEVRELLKELKDRAEKKG

SEQ ID NO: 25058 - protein, 60 aa, Artificial Sequence
  Synthetic
DRELDKALEDIERRIREHNKELDDELRKVREDSRRHLEKLKRELEEIREEARRITEELKK

SEQ ID NO: 25059 - protein, 60 aa, Artificial Sequence
  Synthetic
EEKELLDKLKEDADRIKKELEDTLRELKKKHDDVNDRNRKHHEEVRRRAEKIKDKLRRDK

SEQ ID NO: 25060 - protein, 55 aa, Artificial Sequence
  Synthetic
EEVRKRLDDLEREIKKIIDEIDERHRRLTEENKRSLDRDREELEKLKEEIKRTAD

SEQ ID NO: 25061 - protein, 58 aa, Artificial Sequence
  Synthetic
DEAEKIKEDAKRLIEENDEIVRRIEEEMKKSHKENREILKKIKEDVDRSHEDLRRRSG

SEQ ID NO: 25062 - protein, 56 aa, Artificial Sequence
  Synthetic
EEVLKDLRRRSEEHKKKLEDDLRRHEKKSRDHKEKLKELLERHKRRVEEVRKRETK

SEQ ID NO: 25063 - protein, 60 aa, Artificial Sequence
  Synthetic
SREELMEELERLLERLIREIEKASRENEERVKELKREIEESTKRNKETAKKLLDELTRSN

SEQ ID NO: 25064 - protein, 55 aa, Artificial Sequence
  Synthetic
DELRKTLEDIRRRVEEAKERHRRILKTIKERSEKLTREHRKVNEDIEEKLRRAKK

SEQ ID NO: 25065 - protein, 61 aa, Artificial Sequence
  Synthetic
SERETVERVLDRLREELEKIKKELEDVNRESKKEVERLLRRNEELHKKVEKDARDILRKKG

SEQ ID NO: 25066 - protein, 55 aa, Artificial Sequence
  Synthetic
EELKKTLDKILEDAKEEVREDRKRNEKLNRELEERSRRNEEDLRRLLKKLKDEAD

SEQ ID NO: 25067 - protein, 60 aa, Artificial Sequence
  Synthetic
DEKETIEERRKEIEKIIKDLEKNVRDHEKRIEEIIKEIRDNTEKLKKEAEDLLRRIRKEG

SEQ ID NO: 25068 - protein, 55 aa, Artificial Sequence
  Synthetic
RELEETLRRLDERTKKVIKEAEDVHRRLRERLRKIEKEHEDTLRELKKRLDDEAR

SEQ ID NO: 25069 - protein, 61 aa, Artificial Sequence
  Synthetic
SAEDRLREADERYERELRRLKRELEEVIKEYRKAIEELKKELEDVLRRFREELKRLEEEKG

SEQ ID NO: 25070 - protein, 58 aa, Artificial Sequence
  Synthetic
EEVREIIERLKESLKRNEEDVRRLIRRLKEELKRNKEEVERLKKELEDILRELADRAR

SEQ ID NO: 25071 - protein, 61 aa, Artificial Sequence
  Synthetic
DAERELKKVEDEYEKRIRDLERDLRRVLEEYERAIEELKKELDDVLREAEKALEDLLRKKG

SEQ ID NO: 25072 - protein, 59 aa, Artificial Sequence
  Synthetic
GEEVKEIKKELEESLKRNEDKVRELKRRLEELLKENEKKVRELIRRLEEELRRLAERTR

SEQ ID NO: 25073 - protein, 61 aa, Artificial Sequence
  Synthetic
SAEEELKKVDDDYEREIRRLEKELEDVLRDVDRDHRRLEEELKKVIRDIEEALKDLLRKKG

SEQ ID NO: 25074 - protein, 58 aa, Artificial Sequence
  Synthetic
EEVREIKERLRKSLEDNERKVKEIIDRIREDLKENRDRVRKLIKDLDDELKELAKKAK

SEQ ID NO: 25075 - protein, 60 aa, Artificial Sequence
  Synthetic
DEEREIEERIKRILEDLKRNLEDNERKIRKIVKDNRENNKRNEDKIRRILEELKRAKEEG

SEQ ID NO: 25076 - protein, 55 aa, Artificial Sequence
  Synthetic
ERVRKLEKDLEKALEEIRRRYEELLKRLKRENEESKKTYDKLIEELRRAAREIKR

SEQ ID NO: 25077 - protein, 60 aa, Artificial Sequence
  Synthetic
DEKERIEEEIRRILRELEELTERNEKKIRDIVREIRKNSEENRRKIEKILEELEELKKEG

SEQ ID NO: 25078 - protein, 55 aa, Artificial Sequence
  Synthetic
EEVEELLRRLRKRLEDLERRNKELLEELKERLERAEKRNRDLLKELEDALERIRK

SEQ ID NO: 25079 - protein, 60 aa, Artificial Sequence
  Synthetic
DEEEEIEKKLRKNIRDAEEKTKRNKERAEDNLRKARENSKRNEEDIRRKLKRLKELKEEG

SEQ ID NO: 25080 - protein, 55 aa, Artificial Sequence
  Synthetic
ERVDRLKKELERMHRKLDKENRDIEKRVREEHRRLTERNRKLLEDLEEALERIRT

SEQ ID NO: 25081 - protein, 60 aa, Artificial Sequence
  Synthetic
SEEEEIERRLRDNIRKAEENTRRNKEKIDRILEEMRENSKENKRRIEEILDELRKLKEEG

SEQ ID NO: 25082 - protein, 55 aa, Artificial Sequence
  Synthetic
ERVDELKEKVERDHERLRKENEDLLRELRKRLDELRRENEKLLRELEEALDRIRK

SEQ ID NO: 25083 - protein, 60 aa, Artificial Sequence
  Synthetic
SELERVREEIRRLERENEETLREVEEKIRKLLEENREALERVEERVRRVKEELKEVRRRQ

SEQ ID NO: 25084 - protein, 59 aa, Artificial Sequence
  Synthetic
DDVRRDIERLDEEYERRHKDVNRKLKRLDDEYEKATRDVRRRLEELTKELRDEAEKVRK

SEQ ID NO: 25085 - protein, 56 aa, Artificial Sequence
  Synthetic
SERERVDRLEERYEEESRRVEEELRRLLKRYEDFHRELRKRLEDIVREVRKTLKEL

SEQ ID NO: 25086 - protein, 56 aa, Artificial Sequence
  Synthetic
TREIEKRVERLLEENEERLRRVRKEIKKALDENREILKEVEDRARKILEELRRKAK

SEQ ID NO: 25087 - protein, 59 aa, Artificial Sequence
  Synthetic
SELEEVKRRVEEIKKKLKEDLDDHKRRNEKHIKELEDRLEEHRREIEELVRKLEELKRR

SEQ ID NO: 25088 - protein, 59 aa, Artificial Sequence
  Synthetic
EEVRKALKELEDDLRRVLEEIKRAHKKSKEDNKRVLDDLTEKHKRSEEELRDVLRDLER

SEQ ID NO: 25089 - protein, 60 aa, Artificial Sequence
  Synthetic
SSLEELEKRNRERIEELERTLRELEERSRELNERLKRELDEHKKRIDELLEELRRLKEEN

SEQ ID NO: 25090 - protein, 59 aa, Artificial Sequence
  Synthetic
EEVRRALEELEKSHDEVRERIKRRLDESKERNKRALEKIKRDHEESEERLRRALDRTRK

SEQ ID NO: 25091 - protein, 60 aa, Artificial Sequence
  Synthetic
SSLEEVKKENEKLIKELKEELDKIRKENEEHIEKLERELERVKREAEKIKKKLEELKREN

SEQ ID NO: 25092 - protein, 59 aa, Artificial Sequence
  Synthetic
KEVKDALEELKRSHRKVAKEIKEAVKESRKKNEEVAKKIKKALDELKRELDEALKEAKR

SEQ ID NO: 25093 - protein, 60 aa, Artificial Sequence
  Synthetic
DEVETLEERVRRLKKELRDELKRNEDKVRKLKRELEESLKENAKKVEEVERDLERVKREG

SEQ ID NO: 25094 - protein, 59 aa, Artificial Sequence
  Synthetic
DEVRREIERLKRELERVIREYREAIERLKRDLKRAIDKYREDIKRLEEKLRRVDKELEK

SEQ ID NO: 25095 - protein, 59 aa, Artificial Sequence
  Synthetic
SEVERVREENKRSEEKLKKLLEDSRRNLEENRKRLEELLRKSEENLERLKRELDELRKQ

SEQ ID NO: 25096 - protein, 55 aa, Artificial Sequence
  Synthetic
EDLRRNRETNEELRDRVRRTHEKLEREAEKVHEDVRRRHKELEDEVREVLKELRR

SEQ ID NO: 25097 - protein, 56 aa, Artificial Sequence
  Synthetic
SDEELIKRIREELERLLKELRDTIKEVEDRNRESLEDLDRVHKRIKEEIERLEKDL

SEQ ID NO: 25098 - protein, 60 aa, Artificial Sequence
  Synthetic
SEELAKKLKDELRRAKDKVEEIKKRIRDTLEDNRKKAEELKRKNEEDLRRFEKKAEDVRK

SEQ ID NO: 25099 - protein, 56 aa, Artificial Sequence
  Synthetic
SKEDKAREDVKRTIEELKDRNRKLNDKIRKTIEDLERRNEELNKENKDLVDELRDG

SEQ ID NO: 25100 - protein, 56 aa, Artificial Sequence
  Synthetic
EEVLRELREEIEKLEKEHRDNVRKLERDLDRLRKKHEDNKERLERHTRRVEEEKRR

SEQ ID NO: 25101 - protein, 60 aa, Artificial Sequence
  Synthetic
STEEDVRKIVDDARRNLEENKRRIEKIVKELEDKLRENEKKIRKILEDIRRLLEKFKRDD

SEQ ID NO: 25102 - protein, 56 aa, Artificial Sequence
  Synthetic
EDIMRDLRRRLERIAREYKRLLDELKKRLDDIKKTYEDLLRRLREEIERAEEKARR

SEQ ID NO: 25103 - protein, 60 aa, Artificial Sequence
  Synthetic
DEEEEVRKILEEIKKELDDNERRIRKNIRDAEETLRENEKRIRDILKEIEDLLKELKDRD

SEQ ID NO: 25104 - protein, 56 aa, Artificial Sequence
  Synthetic
EDILEKLRRDIERADEEYKRLEEELRRKHDEIRKTYEKLLKELEEAIERVEREAEK

SEQ ID NO: 25105 - protein, 55 aa, Artificial Sequence
  Synthetic
SSKDLLEELRRTVEEVRKRSDDLSRESEEATRRVRKEHDRINKEVEDELRRVRED

SEQ ID NO: 25106 - protein, 56 aa, Artificial Sequence
  Synthetic
EDIVREMRKRLEELLRENEKRNEELLRRLKELLDRSRERVREIEERLRELLEEVRR

SEQ ID NO: 25107 - protein, 57 aa, Artificial Sequence
  Synthetic
DAEKLKRDYEEKSRRVKETLDDLVRRYREEHRRVNEELRKLLEDLKKTVEDVEKEEG

SEQ ID NO: 25108 - protein, 60 aa, Artificial Sequence
  Synthetic
SERLEREIRKLEEENKRTLERVKEKIERLLEENEKVLKEVRDKVKTIKDRLRKLVEEIRR

SEQ ID NO: 25109 - protein, 60 aa, Artificial Sequence
  Synthetic
SVEDEVRKIKRRLEEALERSEKKVRDMVRRNKEFLERAKRRVEEVVKENERALEEVKRRG

SEQ ID NO: 25110 - protein, 56 aa, Artificial Sequence
  Synthetic
EEILRRVRKTVKDVEDTLKELNDRLEKIHREVKKELDRLLKELDDRHRKVAEDLKK

SEQ ID NO: 25111 - protein, 59 aa, Artificial Sequence
  Synthetic
SVEELLRKLEEVLRKIREENERSLKELRDRAREIVKRNRETNRELEEVIKELEKRLSGA

SEQ ID NO: 25112 - protein, 59 aa, Artificial Sequence; identical to SEQ ID NO: 14436
  Synthetic

SEQ ID NO: 25113 - protein, 57 aa, Artificial Sequence
  Synthetic
DEVEKVLEEIKRALDDLRKKVEESKREIKEALKAVEKHTRDSDTANKRTLAEIERGV

SEQ ID NO: 25114 - protein, 55 aa, Artificial Sequence
  Synthetic
ERVVEEVRRVLEELRRRLEKVTEDSRRAIERLAREDARVSKKSIDVNKKLDDDVR

SEQ ID NO: 25115 - protein, 60 aa, Artificial Sequence
  Synthetic
DAEELVRELEERIKRSHERLEELLREVKRLIERSHEELKRLNEEVLRELDRVLDEVAKRG

SEQ ID NO: 25116 - protein, 55 aa, Artificial Sequence
  Synthetic
KDSARELERIVKENAELAERVFREVEKIVRENTKLAEDSVRELKRLVEELKKRAK

SEQ ID NO: 25117 - protein, 58 aa, Artificial Sequence
  Synthetic
SAADEVVERMKELVATVKRENDEVVKELKKLVKELEDDNRRVVEESKKSVEDLARRVG

SEQ ID NO: 25118 - protein, 56 aa, Artificial Sequence
  Synthetic
EDLVREVEKRVRDIVEESRKLAEETRKAVEDIIEKSKRIAEDTLEKNKEMVERLER

SEQ ID NO: 25119 - protein, 55 aa, Artificial Sequence
  Synthetic
SESDEVIRDLARLLDELARHVDDSVRRMDEVVKRSTREADELAKRLDELVKEVEK

SEQ ID NO: 25120 - protein, 56 aa, Artificial Sequence; identical to SEQ ID NO: 15500
  Synthetic

SEQ ID NO: 25121 - protein, 55 aa, Artificial Sequence; identical to SEQ ID NO: 25119
  Synthetic

SEQ ID NO: 25122 - protein, 56 aa, Artificial Sequence; identical to SEQ ID NO: 15500
  Synthetic

SEQ ID NO: 25123 - protein, 55 aa, Artificial Sequence
  Synthetic
SESDDVIRKLRELLEELRTHVEKSIRDLRKILEDSTRHAKRSIEELERLLEEVRK

SEQ ID NO: 25124 - protein, 56 aa, Artificial Sequence; identical to SEQ ID NO: 15502
  Synthetic

SEQ ID NO: 25125 - protein, 55 aa, Artificial Sequence; identical to SEQ ID NO: 25123
  Synthetic

SEQ ID NO: 25126 - protein, 56 aa, Artificial Sequence; identical to SEQ ID NO: 15502
  Synthetic

SEQ ID NO: 25127 - protein, 60 aa, Artificial Sequence
  Synthetic
DREREVKKRLDEVRERIERLLRRVEEESRRVAEEIRRLIEEVRRRNKKVTEEIRELLKGL

SEQ ID NO: 25128 - protein, 55 aa, Artificial Sequence
  Synthetic
EELREELKKLERKIEKVAKEIHDHDKEVTERLEDLLRRITEHARKSDREIEETAR

SEQ ID NO: 25129 - protein, 60 aa, Artificial Sequence; identical to SEQ ID NO: 25127
  Synthetic

SEQ ID NO: 25130 - protein, 55 aa, Artificial Sequence; identical to SEQ ID NO: 25128
  Synthetic

SEQ ID NO: 25131 - protein, 57 aa, Artificial Sequence
  Synthetic
SEVDEAVKNNEEDAKESRRVVEEAVKRDEDIARDIERAAREVVERDKEIVDEVRRGV

SEQ ID NO: 25132 - protein, 60 aa, Artificial Sequence
  Synthetic
SKETKDLLDENSKRSNEISREVKKDLERTVRENKKIVDEVAKALEDTVDKNRRIVEEVTT

SEQ ID NO: 25133 - protein, 60 aa, Artificial Sequence
  Synthetic
SEAEELLKRLEDRAEEILRRLEEILRTSRKLAEDVLRELEKLLRESERRIREVLEELRGI

SEQ ID NO: 25134 - protein, 59 aa, Artificial Sequence
  Synthetic
KEVVDEIKRIVDEVRERLKRIVDENAKIVEDARRALEKIVKENEEILRRLKKELRELRK

SEQ ID NO: 25135 - protein, 57 aa, Artificial Sequence
  Synthetic
SRAETVLKEVTDKIKKLADSSDELLRRNKENIDELKKSSEELLRRLTKAIEEIEKGS

SEQ ID NO: 25136 - protein, 56 aa, Artificial Sequence; identical to SEQ ID NO: 16914
  Synthetic

SEQ ID NO: 25137 - protein, 57 aa, Artificial Sequence; identical to SEQ ID NO: 25135
  Synthetic

SEQ ID NO: 25138 - protein, 56 aa, Artificial Sequence; identical to SEQ ID NO: 16914
  Synthetic

SEQ ID NO: 25139 - protein, 57 aa, Artificial Sequence
  Synthetic
DEVRELLERNRRLLEEIKKTVKDLIRANEELLKRIEDDAKRLIDRNEELLDELEKGL

SEQ ID NO: 25140 - protein, 59 aa, Artificial Sequence
  Synthetic
SEELEELRRVVEESDETIKRLLEEAKESVDRSLDRIRKLLEDVRRSVERSAKRIDEKRK

SEQ ID NO: 25141 - protein, 60 aa, Artificial Sequence
  Synthetic
STEEVLDEIRKLHKTLTEDIKRVLREIEELHRRTIEENKEVLDKIAEDYKRVIDDVRTKD

SEQ ID NO: 25142 - protein, 56 aa, Artificial Sequence; identical to SEQ ID NO: 18130
  Synthetic

SEQ ID NO: 25143 - protein, 60 aa, Artificial Sequence; identical to SEQ ID NO: 19323
  Synthetic

SEQ ID NO: 25144 - protein, 62 aa, Artificial Sequence
  Synthetic
EDSERLVREVEDLVRRLVRRSEKSNEEVKRTVEELVRRMEESNDRVRDLVRRLVEELKRAVD

SEQ ID NO: 25145 - protein, 59 aa, Artificial Sequence
  Synthetic
SEAEKAKETIDRLADRVRKLLEEIKRSLDDSRRKSKETVEENEKTLDRMRKEVDAAKRG

SEQ ID NO: 25146 - protein, 56 aa, Artificial Sequence; identical to SEQ ID NO: 19650
  Synthetic

SEQ ID NO: 25147 - protein, 59 aa, Artificial Sequence; identical to SEQ ID NO: 25145
  Synthetic

SEQ ID NO: 25148 - protein, 56 aa, Artificial Sequence; identical to SEQ ID NO: 19650
  Synthetic

SEQ ID NO: 25149 - protein, 56 aa, Artificial Sequence
  Synthetic
SEVEELIKRLAKVLKELVDKVRKVIEDTKELLERLKRRSEDHIRKLREVLKEAKDQ

SEQ ID NO: 25150 - protein, 59 aa, Artificial Sequence
  Synthetic
EELDRRIEKVLKEIEEKIREVIKEWERVHREVEELLKRLIDENRKVLDEIRKLLEEKSK

SEQ ID NO: 25151 - protein, 56 aa, Artificial Sequence; identical to SEQ ID NO: 25149
  Synthetic

SEQ ID NO: 25152 - protein, 59 aa, Artificial Sequence; identical to SEQ ID NO: 25150
  Synthetic

SEQ ID NO: 25153 - protein, 59 aa, Artificial Sequence; identical to SEQ ID NO: 19801
  Synthetic

SEQ ID NO: 25154 - protein, 59 aa, Artificial Sequence
  Synthetic
DKALEEAKRVLAENNEVIKDIKRALDELLKELEKSVRESEERLRRLLEEVKRVIEEVAT

SEQ ID NO: 25155 - protein, 59 aa, Artificial Sequence
  Synthetic
SEAERLEARARELLRANEELMDDLRAKAEELLKRNDRLVKEIEKKVREVLAAIEELKRR

SEQ ID NO: 25156 - protein, 59 aa, Artificial Sequence
  Synthetic
KRLEELLRRLNEEHKRISDELRKLLDEALEAHRELSRRLEEELERLLREIERLVEEVTR

SEQ ID NO: 25157 - protein, 56 aa, Artificial Sequence
  Synthetic
SVDEVLKEIEDALRRLKEEVERVLKENEDELRRLEEEVRRVLKEDEELLESLKRGV

SEQ ID NO: 25158 - protein, 59 aa, Artificial Sequence
  Synthetic
EKAIRDVAKEIRDRLKELEEEIEEVTRRNLKLLADVEEEIRRVHEKTRRLLETVLRRAT

SEQ ID NO: 25159 - protein, 60 aa, Artificial Sequence
  Synthetic
DDLERAREEVADLIRKHEEKTRRILEESRRLNERHRELSARILDEIRKLAERIEELIKRE

SEQ ID NO: 25160 - protein, 59 aa, Artificial Sequence; identical to SEQ ID NO: 20434
  Synthetic

SEQ ID NO: 25161 - protein, 57 aa, Artificial Sequence
  Synthetic
KEVEDAVKELEDLLRANEDKTRSIVEDMRASNKDLEDHSRASEEEVRKLLDDLRRAG

SEQ ID NO: 25162 - protein, 56 aa, Artificial Sequence
  Synthetic
IKTLLDRVRKLAEEDAERLDRLRRESEELNERVRRVDKKLLEEIRRKAKKVEDDTR

SEQ ID NO: 25163 - protein, 57 aa, Artificial Sequence; identical to SEQ ID NO: 25161
  Synthetic

SEQ ID NO: 25164 - protein, 56 aa, Artificial Sequence; identical to SEQ ID NO: 25162
  Synthetic

SEQ ID NO: 25165 - protein, 56 aa, Artificial Sequence
  Synthetic
DEEEDLERAIKKLLDENRELLKRIAEELRRLLEELRRLTEESADRLRRLLKELKDR

SEQ ID NO: 25166 - protein, 56 aa, Artificial Sequence
  Synthetic
AETLLRELEKLSRDNKELLKKIEKEIRDLIKEDKERNIELSERLRKLVEELKKKAT

SEQ ID NO: 25167 - protein, 56 aa, Artificial Sequence; identical to SEQ ID NO: 25165
  Synthetic

SEQ ID NO: 25168 - protein, 56 aa, Artificial Sequence; identical to SEQ ID NO: 25166
  Synthetic

SEQ ID NO: 25169 - protein, 57 aa, Artificial Sequence
  Synthetic
DDAERILREMERLLEENKEISDEIAKELKRLLDENRKLSEDVVKALEDLLRDLERRS

SEQ ID NO: 25170 - protein, 59 aa, Artificial Sequence
  Synthetic
KDTLRELARSIRKLSAENKERLKELLRELKKLSDENKERIKKLLSDAEKIIEDVARRAK

SEQ ID NO: 25171 - protein, 60 aa, Artificial Sequence
  Synthetic
SSEERLRAVIEDLKRLAEESRKRHKELIDELAKAVERIERRHKKLLDEIKAVVDDIRRGV

SEQ ID NO: 25172 - protein, 56 aa, Artificial Sequence
  Synthetic
ADTIIEEVKRVLEELARSTEEVEKRVRDAIEELERSSEELARRIKEVLKRLEEETR

SEQ ID NO: 25173 - protein, 60 aa, Artificial Sequence
  Synthetic
DEARELVKELEDLIREITKTVRRLLEESEELIKRIDDAVDDLRRADEDLNREIKEEIEKG

SEQ ID NO: 25174 - protein, 56 aa, Artificial Sequence
  Synthetic
ERILRELEERVKELEKEAREILKRSEDETDKLREKAERILEDLERANRRTMDEARR

SEQ ID NO: 25175 - protein, 60 aa, Artificial Sequence; identical to SEQ ID NO: 25173
  Synthetic

SEQ ID NO: 25176 - protein, 56 aa, Artificial Sequence; identical to SEQ ID NO: 25174
  Synthetic

SEQ ID NO: 25177 - protein, 59 aa, Artificial Sequence
  Synthetic
DEIRKVVKEITDLLKASNDKNRKVVEEIRDLLRKSKKLADELVERLRALVEDLRRRIDK

SEQ ID NO: 25178 - protein, 59 aa, Artificial Sequence
  Synthetic
SEDLKRVEERAREVSRRNEESMRRVKEDADRVSEANKEVLDRVREEVKRLIEEVRETLR

SEQ ID NO: 25179 - protein, 59 aa, Artificial Sequence; identical to SEQ ID NO: 25177
  Synthetic

SEQ ID NO: 25180 - protein, 59 aa, Artificial Sequence; identical to SEQ ID NO: 25178
  Synthetic

SEQ ID NO: 25181 - protein, 57 aa, Artificial Sequence
  Synthetic
STAETVEKKVEEVIRENEKSMRESEEKVDRSTKRIEDVLRRLEETIRKTSDDIAKGV

SEQ ID NO: 25182 - protein, 59 aa, Artificial Sequence
  Synthetic
REDATRVIEEAKRILDEARKLNEETIRRSEELVRRIERVIEEIIKRSEKLLEDVARESK

SEQ ID NO: 25183 - protein, 57 aa, Artificial Sequence; identical to SEQ ID NO: 25181
  Synthetic

SEQ ID NO: 25184 - protein, 59 aa, Artificial Sequence; identical to SEQ ID NO: 25182
  Synthetic

SEQ ID NO: 25185 - protein, 57 aa, Artificial Sequence
  Synthetic
STAETVAEEVERVLKHSDDLIKEVEDVNRRVEEEIKRVIRELEEENERLVAEVRKGV

SEQ ID NO: 25186 - protein, 59 aa, Artificial Sequence
  Synthetic
EEAAREIIKRLREVNKRTKEKLDELIKHSEEVLERVKRLIDELRKHSEEVLEDLRRRAK

SEQ ID NO: 25187 - protein, 57 aa, Artificial Sequence; identical to SEQ ID NO: 25185
  Synthetic

SEQ ID NO: 25188 - protein, 59 aa, Artificial Sequence; identical to SEQ ID NO: 25186
  Synthetic

SEQ ID NO: 25189 - protein, 59 aa, Artificial Sequence; identical to SEQ ID NO: 21345
  Synthetic

SEQ ID NO: 25190 - protein, 56 aa, Artificial Sequence
  Synthetic
AETIERVVRELLEENKEVLRKTEEAVKRSTETNKRLLEASKEVADRLRERIKEAAK

SEQ ID NO: 25191 - protein, 61 aa, Artificial Sequence
  Synthetic
SRVEEIIEDLRRLLEEIRKENEDSIRRSKELLDRVKEINDTIIAELERLLKDIEKEVREKG

SEQ ID NO: 25192 - protein, 59 aa, Artificial Sequence
  Synthetic
EDKARKVAEVAEKVLRDIDKLDRESKEAFRATNEEIAKLDEDTARVAERVKKAIEDLAK

SEQ ID NO: 25193 - protein, 61 aa, Artificial Sequence; identical to SEQ ID NO: 25191
  Synthetic

SEQ ID NO: 25194 - protein, 59 aa, Artificial Sequence; identical to SEQ ID NO: 25192
  Synthetic

SEQ ID NO: 25195 - protein, 61 aa, Artificial Sequence
  Synthetic
SEVDEIIKELERLLAEIARENERIIRESRKLADEVRKRNEDAIRKLEELVARLADAVRRKG

SEQ ID NO: 25196 - protein, 59 aa, Artificial Sequence
  Synthetic
KDEVTKVKKVADDVLAEIKKLDDETRRVIEDTNKKIADLDKATRDVVRKVLEEVKKLEK

SEQ ID NO: 25197 - protein, 59 aa, Artificial Sequence; identical to SEQ ID NO: 21407
  Synthetic

SEQ ID NO: 25198 - protein, 59 aa, Artificial Sequence
  Synthetic
SEKLKELRDVIAEVAKRIDELDEYTRESIRRAKKEIERLNRETKKVIEEVVKRIEEERK

SEQ ID NO: 25199 - protein, 59 aa, Artificial Sequence; identical to SEQ ID NO: 21407
  Synthetic

SEQ ID NO: 25200 - protein, 59 aa, Artificial Sequence; identical to SEQ ID NO: 25198
  Synthetic

SEQ ID NO: 25201 - protein, 59 aa, Artificial Sequence
  Synthetic
DAVEEAEKLIRKVIADSEKLLRDLADLNAKSIRRSEKLVEDDRRANEDVIRKLEELRRN

SEQ ID NO: 25202 - protein, 59 aa, Artificial Sequence
  Synthetic
EELLRRIKKLLDEIKKAIEDSSREIKRLLEESERVMKRSSEDIKRTLDDTRRVVEEVRR

SEQ ID NO: 25203 - protein, 59 aa, Artificial Sequence; identical to SEQ ID NO: 25201
  Synthetic

SEQ ID NO: 25204 - protein, 59 aa, Artificial Sequence; identical to SEQ ID NO: 25202
  Synthetic

SEQ ID NO: 25205 - protein, 56 aa, Artificial Sequence
  Synthetic
SSDEVLKEIEEIIRRLEAEVRRVNAEVNASTEDLAREVEEVLRATNELIEELERRV

SEQ ID NO: 25206 - protein, 59 aa, Artificial Sequence
  Synthetic
EEALSKAIKDVRDIVKKVKDELKEWRDRNKELVDRLSEELKEWLKDVERVLKELTDKDR

SEQ ID NO: 25207 - protein, 57 aa, Artificial Sequence
  Synthetic
SEADDVLKKLAETVKRIIERLKKLTDDSRRLVEEVHRRNDKLSKESAEAVRKAEERG

SEQ ID NO: 25208 - protein, 55 aa, Artificial Sequence
  Synthetic
EELSAEVKKLLDEVRKALARHKDENDKLLKEIEDSLRRHKEENDRLLEKLKESTR

SEQ ID NO: 25209 - protein, 57 aa, Artificial Sequence; identical to SEQ ID NO: 25207
  Synthetic

SEQ ID NO: 25210 - protein, 55 aa, Artificial Sequence; identical to SEQ ID NO: 25208
  Synthetic

SEQ ID NO: 25211 - protein, 59 aa, Artificial Sequence; identical to SEQ ID NO: 22001
  Synthetic

SEQ ID NO: 25212 - protein, 59 aa, Artificial Sequence
  Synthetic
EDKVERVVREVEKLHEEDRKRLEESTRSVRKLLEELKRELEKSTRSVKALVDELRERVR

SEQ ID NO: 25213 - protein, 59 aa, Artificial Sequence; identical to SEQ ID NO: 22001
  Synthetic

SEQ ID NO: 25214 - protein, 59 aa, Artificial Sequence; identical to SEQ ID NO: 25212
  Synthetic

SEQ ID NO: 25215 - protein, 59 aa, Artificial Sequence
  Synthetic
SEAEEIRRRLEEISRRSVEHLRKVLEEIKRISERSKRHLDRVLEENARRLEELAELLKR

SEQ ID NO: 25216 - protein, 56 aa, Artificial Sequence
  Synthetic
EEVLRELEELLKESEERIKRIEEEIKKIIDKSREDIKRVLEEIERLNAKAADDLRK

SEQ ID NO: 25217 - protein, 60 aa, Artificial Sequence
  Synthetic
SEVDDVLRRLEELIKTLEDINAKSLEDIKKLIDDLAKILEDALRKHEKLIRELREAKKGI

SEQ ID NO: 25218 - protein, 56 aa, Artificial Sequence
  Synthetic
KEALDRMREEIRRLEEESRKSDETIERLIRELRRRVEEVLKTSTDLIRELEEEVKK

SEQ ID NO: 25219 - protein, 60 aa, Artificial Sequence; identical to SEQ ID NO: 25217
  Synthetic

SEQ ID NO: 25220 - protein, 56 aa, Artificial Sequence; identical to SEQ ID NO: 25218
  Synthetic

SEQ ID NO: 25221 - protein, 59 aa, Artificial Sequence
  Synthetic
SDAEELLKRVADLLKASLESLEKILRDSKELMDRWRKKLEDLLRESEELVDRAEKILRR

SEQ ID NO: 25222 - protein, 55 aa, Artificial Sequence
  Synthetic
ERVREELKKLLTRVEEEHRKVLETDKKILKEAHKESKEVNDRDRELLERLEESVR

SEQ ID NO: 25223 - protein, 57 aa, Artificial Sequence
  Synthetic
DAAERAKEKLDKILEDLRDVVRASKENLDRLHAENAETLERSKANLDRLLEKVKKDG

SEQ ID NO: 25224 - protein, 59 aa, Artificial Sequence
  Synthetic
ERDIERILRELEAVLKKLTDESERLNREVERVSRDTKKKSKELNEELKAVLDEVKRKAD

SEQ ID NO: 25225 - protein, 60 aa, Artificial Sequence
  Synthetic
SEIETVRREIEKILDDLRRTVKRIEDEVRKIHEDLRRSLEDSKRNIEEILKDLERAARRD

SEQ ID NO: 25226 - protein, 59 aa, Artificial Sequence
  Synthetic
KEDIDKLLKELRDLVEKIKKDLKELLERYEEIVRRIKELLKDLNREAEEVVRRLKEELR

SEQ ID NO: 25227 - protein, 57 aa, Artificial Sequence
  Synthetic
KELEDVIEEVKKLLKTVNEESRRVAEEVRKLIREVSEELTEVIRRVERLVEEVAKGV

SEQ ID NO: 25228 - protein, 56 aa, Artificial Sequence
  Synthetic
AETVLRSAEDIVAKNRKLAEEVLRRVKKIVEENRKIASEVLDDVRKLVEDVLARAS

SEQ ID NO: 25229 - protein, 60 aa, Artificial Sequence
  Synthetic
SKLEEVEKAVRKVIEDSRRVNEEVNRRSEEVVRELEKVHREVNDASRRVVEKARRVLKGS

SEQ ID NO: 25230 - protein, 58 aa, Artificial Sequence; identical to SEQ ID NO: 22670
  Synthetic

SEQ ID NO: 25231 - protein, 60 aa, Artificial Sequence; identical to SEQ ID NO: 25229
  Synthetic

SEQ ID NO: 25232 - protein, 58 aa, Artificial Sequence; identical to SEQ ID NO: 22670
  Synthetic

SEQ ID NO: 25233 - protein, 56 aa, Artificial Sequence
  Synthetic
SAEEVKEELKRIATKLKEEIKENIRRLEESVEKIAKELAENIKRLEDILRDVKRGL

SEQ ID NO: 25234 - protein, 56 aa, Artificial Sequence
  Synthetic
GEELVERLRRVVEEVRERLKDSSRELRKINEDSRKAVEDSSAEVAKVVEELERRDT

SEQ ID NO: 25235 - protein, 57 aa, Artificial Sequence
  Synthetic
SEIERVKKRLEELLAEVEESTRRLEERLKRLLEEAKRSSEEVEKELRRLLEAVRRGL

SEQ ID NO: 25236 - protein, 56 aa, Artificial Sequence
  Synthetic
ADDVLARVEELAKRAHDENERLIREVEELVRAHNKRNKELVDEVKRLVEKVIEEER

SEQ ID NO: 25237 - protein, 57 aa, Artificial Sequence; identical to SEQ ID NO: 25235
  Synthetic

SEQ ID NO: 25238 - protein, 56 aa, Artificial Sequence; identical to SEQ ID NO: 25236
  Synthetic

SEQ ID NO: 25239 - protein, 60 aa, Artificial Sequence
  Synthetic
SDVDRVLEEIRKLLEDLKRHSEKVSEENEDLLRANTELNKRVSEDNERLLEELKRLRERG

SEQ ID NO: 25240 - protein, 59 aa, Artificial Sequence
  Synthetic
EEAKKKLDEVLERAKRTIDRLLETSDRSLEKVEADLRRLNEELDRSLERAERTIRELAK

SEQ ID NO: 25241 - protein, 60 aa, Artificial Sequence; identical to SEQ ID NO: 25239
  Synthetic

SEQ ID NO: 25242 - protein, 59 aa, Artificial Sequence; identical to SEQ ID NO: 25240
  Synthetic

SEQ ID NO: 25243 - protein, 55 aa, Artificial Sequence
  Synthetic
STEDVLRKIKEDVKRVIDDNRRILDEVRRTSKRVLDDLRANLKHIAEEVERVLRG

SEQ ID NO: 25244 - protein, 56 aa, Artificial Sequence
  Synthetic
SKELLEKAKAVVDEIKRLAEESLKRLEDLSRDHKRRAKELNDEIAKVVDELAKRAT

SEQ ID NO: 25245 - protein, 60 aa, Artificial Sequence
  Synthetic
SAEELLREVAELVKRVDEDLRRLLEEVRASNEEVIRRLEEILKRIEEENRKVVEELRRGG

SEQ ID NO: 25246 - protein, 59 aa, Artificial Sequence
  Synthetic
EETVKRLLDELRELLERLKRTIEELLKRNRDLLADAEEKARRLLEENRKLLKAARDTAT

SEQ ID NO: 25247 - protein, 59 aa, Artificial Sequence
  Synthetic
SEDEDLDRVAEKLAREHKKSVEEIKRVLKSADEESKKLVRDTERVIEEIKREVEEARRG

SEQ ID NO: 25248 - protein, 55 aa, Artificial Sequence
  Synthetic
EEVLKKLAEIVRRVKEENRKVNEEVEKRLRELEEENKKVIEDLKSTVEELVERLR

SEQ ID NO: 25249 - protein, 59 aa, Artificial Sequence; identical to SEQ ID NO: 25247
  Synthetic

SEQ ID NO: 25250 - protein, 55 aa, Artificial Sequence; identical to SEQ ID NO: 25248
  Synthetic

SEQ ID NO: 25251 - protein, 60 aa, Artificial Sequence; identical to SEQ ID NO: 23529
  Synthetic

SEQ ID NO: 25252 - protein, 56 aa, Artificial Sequence; identical to SEQ ID NO: 23530
  Synthetic

SEQ ID NO: 25253 - protein, 57 aa, Artificial Sequence
  Synthetic
SKEDRLREELKKLLARLAEEIERLKRALEESNKDLKRTIDASEKHLRDVNEDVKRGG

SEQ ID NO: 25254 - protein, 59 aa, Artificial Sequence; identical to SEQ ID NO: 24672
  Synthetic

SEQ ID NO: 25255 - protein, 57 aa, Artificial Sequence; identical to SEQ ID NO: 25253
  Synthetic

SEQ ID NO: 25256 - protein, 59 aa, Artificial Sequence; identical to SEQ ID NO: 24672
  Synthetic

SEQ ID NO: 25257 - protein, 60 aa, Artificial Sequence; identical to SEQ ID NO: 24699
  Synthetic

SEQ ID NO: 25258 - protein, 59 aa, Artificial Sequence
  Synthetic
RETAERARETLKRLLDENRDRSKKVKEEIRRILEDLTRTTERVKREIAKLLKELEDTAR

SEQ ID NO: 25259 - protein, 60 aa, Artificial Sequence; identical to SEQ ID NO: 24699
  Synthetic

SEQ ID NO: 25260 - protein, 59 aa, Artificial Sequence; identical to SEQ ID NO: 25258
  Synthetic

SEQ ID NO: 25261 - protein, 58 aa, Artificial Sequence
  Synthetic
SELEEVLRRIEALVRKAHKENEDVLREIERLVRTAHRLNKKVDDDSAKIAEDLKRGGR

SEQ ID NO: 25262 - protein, 58 aa, Artificial Sequence
  Synthetic
EAVRRLKEILERLKEEVRRSLEELRKEVERLKKEVEDSLRELKKSLEEWVKSLEEATR

SEQ ID NO: 25263 - protein, 58 aa, Artificial Sequence; identical to SEQ ID NO: 25261
  Synthetic

SEQ ID NO: 25264 - protein, 58 aa, Artificial Sequence; identical to SEQ ID NO: 25262
  Synthetic

SEQ ID NO: 25265 - protein, 56 aa, Artificial Sequence
  Synthetic
SKEEELEKLLREHHEKIKRLKEESKRINDRIRRTVEELIKESEKINRDINDTVRKG

SEQ ID NO: 25266 - protein, 56 aa, Artificial Sequence
  Synthetic
EDSVERIARELERNLDDLARVLKESEDDLAEILRRLKEVLEESERDLERVEREVRK

SEQ ID NO: 25267 - protein, 59 aa, Artificial Sequence
  Synthetic
SEAEEAAERAKRAAKEAVERAKRAVERNEEAARRAAEKAREATERAERAARRAADKARK

SEQ ID NO: 25268 - protein, 60 aa, Artificial Sequence
  Synthetic
IKDAADKLAEAAKRAVDISKKAADDLKRLAKEDNEIAREAARRLAEAAKEAVKLVDDVTR

SEQ ID NO: 25269 - protein, 56 aa, Artificial Sequence
  Synthetic
SEKEKAAEDLRRAIEEAKKRSEEAAKELEDALRKAEKEARDSAETLKEAAKRAADA

SEQ ID NO: 25270 - protein, 59 aa, Artificial Sequence
  Synthetic
KDAATEAKKAADTIAKLIEDNAKRALEAAREIAKLIEKSAKEALEAAERIARLIEEAAN

SEQ ID NO: 25271 - protein, 59 aa, Artificial Sequence
  Synthetic
SVEEAARRAAKALKDAAKKLLEANEKAARAWKELAKELIKADEKALKILEEAARKARRD

SEQ ID NO: 25272 - protein, 57 aa, Artificial Sequence
  Synthetic
AEEAAKEAIRIAEEALRRSAEAAERAARIAEDAARKSRKAAEDAAKIAKEAADRARK

SEQ ID NO: 25273 - protein, 62 aa, Artificial Sequence
  Synthetic
SEEDRLRELAERARRLAKRNRELAKEIIDEIRKLIRDAREAAKKSAEKAKRLIDDARRVAGK

SEQ ID NO: 25274 - protein, 56 aa, Artificial Sequence
  Synthetic
IEEAAKANEEAIKASEEAVDEAARALEEAAEASKRANEKADKALEDAVRAAEEATR

SEQ ID NO: 25275 - protein, 61 aa, Artificial Sequence
  Synthetic
SEKEDVLRRIREAHERNKRLLERVAEEIKRIVEESRKLLEDVRKKAEDAARRAEEALRKEA

SEQ ID NO: 25276 - protein, 56 aa, Artificial Sequence
  Synthetic
KEALLKAAKEALEALEEALRLIAKATEEAARAAKEALDLILEADRKSAKAAEEALR

SEQ ID NO: 25277 - protein, 61 aa, Artificial Sequence
  Synthetic
SEREEVAKRATDAHEENERLLREVEKRIKEALERNEELLKRVSDKAREAAKKLEDALRRRA

SEQ ID NO: 25278 - protein, 56 aa, Artificial Sequence
  Synthetic
KEALRRAAKKALDAAEEALELIRKASKEAADAAREALKLILEADKKSLEAAREALR

SEQ ID NO: 25279 - protein, 60 aa, Artificial Sequence
  Synthetic
SEREEIEEIKKRVDRTLEEYERKVEDIRRKLTELKDESDKKVKDVRRKLKETEDRVREEG

SEQ ID NO: 25280 - protein, 58 aa, Artificial Sequence
  Synthetic
EELRELIERLVRIAEEVSEEDERVLRSLEDILRKVVEENERLLERLKRILEELIRRTR

SEQ ID NO: 25281 - protein, 58 aa, Artificial Sequence
  Synthetic
SEDEELKKELEKLLKELEEKLEKYRDDLRKDKERLKEKLDRYRERLRELMEELKDLLD

SEQ ID NO: 25282 - protein, 59 aa, Artificial Sequence
  Synthetic
EDVLRDIVRRVVEVLRKNLKIVEEIIRKIEELLEKNLRLVEEILRRIARLLEEVLEKTR

SEQ ID NO: 25283 - protein, 60 aa, Artificial Sequence
  Synthetic
SDAEVIEELVRLHRKLLEDILKLLKELVDIHRETLRRIEEIVERIVRLIEALLDKIRKEG

SEQ ID NO: 25284 - protein, 59 aa, Artificial Sequence
  Synthetic
KEALERLLERLKEIVDRIKEELDRLLKRSEDSIREIEERVKRLLEESKRVVDEIRERLK

SEQ ID NO: 25285 - protein, 57 aa, Artificial Sequence
  Synthetic
SKEKKILDRLRELLKESRDLNRRVKETLKKLLEDSKRLLDEIRKRLKELLDELEKEN

SEQ ID NO: 25286 - protein, 55 aa, Artificial Sequence
  Synthetic
EAVKRLKEVLDEVAELVKTLLEVNRKILEDVDKLIEEVLKLNDDILREVVKLAED

SEQ ID NO: 25287 - protein, 61 aa, Artificial Sequence
  Synthetic
SEKEKLLEDIADIARKILKLLKEHLDKLRKLLEEIRRLLEEHSRVLRELIERILDALRRKK

SEQ ID NO: 25288 - protein, 55 aa, Artificial Sequence
  Synthetic
KDLERELKRVKEISRKLEEELKELKERVKRDSEKMNEDLDRLLEDAERRIRKTRE

SEQ ID NO: 25289 - protein, 59 aa, Artificial Sequence
  Synthetic
SEEDKVLEELKRLLEELLRKHEEVLKEIKELLDKIIKKHEESLRRIKKLAEEIKERAKK

SEQ ID NO: 25290 - protein, 59 aa, Artificial Sequence
  Synthetic
KTLTEELKRIEDKLEELIRRSKDELDKIVREAEKIIEESKRRLEKLLRELERIIEDAKR

SEQ ID NO: 25291 - protein, 60 aa, Artificial Sequence
  Synthetic
SELEELVKRIEKTLRDLRRKNEELRKEVEEVEREDRERLERAAEDLERVEKKVEDEVRRR

SEQ ID NO: 25292 - protein, 57 aa, Artificial Sequence
  Synthetic
IEKTIEDARRLLEKILKLHRENSEESRRLIEDINRVNRELIDEVAELAKKILRRVEE

SEQ ID NO: 25293 - protein, 61 aa, Artificial Sequence
  Synthetic
RDEELLERVERLLRELLDTNRRKLEEVEKELRRLLETNKKTLDDVRRLLKELLDVLETREV

SEQ ID NO: 25294 - protein, 55 aa, Artificial Sequence
  Synthetic
DDLRELKKRIEDLLKEDKERLEKIARDIERDLERYRRDLKRLEDELREDIERARR

SEQ ID NO: 25295 - protein, 58 aa, Artificial Sequence
  Synthetic
REEEVLRRLREIIKRLLDKNRKVNEDLVRLIKRVLDKNREVLKRLRDLIRELLEVVRN

SEQ ID NO: 25296 - protein, 60 aa, Artificial Sequence
  Synthetic
DEDLERALKKVKDELERIVRENEDADRKIKEEVDRLSEENEKVNREIKKELDDVVEETKK

SEQ ID NO: 25297 - protein, 56 aa, Artificial Sequence
  Synthetic
EEDERLTKRVEEIKRENRELLRRLEEEVKELERKSEKIVRDLKEKVDRAKEKLDSN

SEQ ID NO: 25298 - protein, 57 aa, Artificial Sequence
  Synthetic
DKDVLTELKRILDELLKLVEKLIRRNLRLLEELLRLVREILRTSNEILEEILKDARR

SEQ ID NO: 25299 - protein, 60 aa, Artificial Sequence
  Synthetic
SELDTLVELIKRILEEITRVNKELVDEVRKLLEEIVRINERSVRTIEKILRDIAELIRRG

SEQ ID NO: 25300 - protein, 60 aa, Artificial Sequence
  Synthetic
EEELEKELRRLKKELEEVVRKSREDLERLKKELEKIVKESEDELKKVEEKVKKLADDARR

SEQ ID NO: 25301 - protein, 58 aa, Artificial Sequence
  Synthetic
TEEEVLRKVEKLIKDLLDVLRDLLRASEEVVREALRVLEELIEENKRVIEELSRALSD

SEQ ID NO: 25302 - protein, 60 aa, Artificial Sequence
  Synthetic
ERKLRRDLTETKKELEKRHEDLRRELEKLLRDYKRELEEIERRLEEIEKTLKRRADETRR

SEQ ID NO: 25303 - protein, 58 aa, Artificial Sequence
  Synthetic
SDLERLEKEIRDLLDELRRLTEELEKRSRDILKRLKEILEELKRRIERLLDELRRRRG

SEQ ID NO: 25304 - protein, 58 aa, Artificial Sequence
  Synthetic
DSVRELIEVLKKALEDVRRVLRAIEEIVRRSVELNEKHSRELRRVLKELLELVAKAAE

SEQ ID NO: 25305 - protein, 55 aa, Artificial Sequence
  Synthetic
SEEEELRKLAKKIEEVIKTSRDKLDKSRKELEKVIRDIERRLRELRRELEELVRR

SEQ ID NO: 25306 - protein, 57 aa, Artificial Sequence
  Synthetic
REDVLREIEKLLEEILRALRKLLKDLLDLHDEVLKADEKLLKRLREIVKKVLEEVRK

SEQ ID NO: 25307 - protein, 55 aa, Artificial Sequence
  Synthetic
SEEEKLRELRKRLEDTVRRSKEELEKSTEELKDVIKKSEEKLEELKRRLEEMKRR

SEQ ID NO: 25308 - protein, 57 aa, Artificial Sequence
  Synthetic
SEKLLTDAARILDDVVRVDRELLRLVLELHKRLVRADEKLLTDIRELARRVLEETRK

SEQ ID NO: 25309 - protein, 59 aa, Artificial Sequence
  Synthetic
DEDERLRELRDRVRRSEEEDERRNKRHEERVKELEDEDKERNERHRKRLKEITDRLKER

SEQ ID NO: 25310 - protein, 55 aa, Artificial Sequence
  Synthetic
EDLLKVVRDSLEILKELIRTVLKAIEESLRILEELIERLKRHIETILRLAAETTT

SEQ ID NO: 25311 - protein, 59 aa, Artificial Sequence
  Synthetic
DEEELEKEIKKLLEEATKKHEDVKREIKERLEKLRRDHEEAEKRVRDELRRLEEELERR

SEQ ID NO: 25312 - protein, 55 aa, Artificial Sequence
  Synthetic
EDLIRVLKKLIEDLERLLTKNRRLLEEIVKILTKLLKDNRDLLRRILRKVEETAK

SEQ ID NO: 25313 - protein, 57 aa, Artificial Sequence
  Synthetic
DEARRIKEIVDRAVEIWRRLVEEIKRIVKEVLDKWRKLIRELIELVRKALEDLRRTN

SEQ ID NO: 25314 - protein, 58 aa, Artificial Sequence
  Synthetic
DELKRLEDDVRKKLKDLEDKLRKLRKELEETHRRLAETIRRIAEELERLHRELKRESK

SEQ ID NO: 25315 - protein, 57 aa, Artificial Sequence
  Synthetic
SKDERLRKVLEDVERLLREVLKKHRKVIDDLRELLKRVVEIHRRVLEEILKRLEEEG

SEQ ID NO: 25316 - protein, 59 aa, Artificial Sequence
  Synthetic
DEVVERIRRTLEEIERRLRKTDKDLEKDLRELKKDLDRTDEELKRKVEKLKRELKETSK

SEQ ID NO: 25317 - protein, 61 aa, Artificial Sequence
  Synthetic
DEKDRLEEEVRKLLKEAEDELRRLKRENEKLNRELKETLKRVKEESERLLRKLREDVRKDG

SEQ ID NO: 25318 - protein, 57 aa, Artificial Sequence
  Synthetic
LEEVLEELDRLNKEVLKAIEEAAKKLEDLNRRVLEVLEDILRKLKEIVDEALKVLRK

SEQ ID NO: 25319 - protein, 59 aa, Artificial Sequence
  Synthetic
KEEELLERLREVLKTDLDLLRDLVRTLKEDLDKDARLLEELVERLKKLLDKIKRLLEEE

SEQ ID NO: 25320 - protein, 56 aa, Artificial Sequence
  Synthetic
ERVKREIRKDLDKIRREIEKIVKESEESNERSLEKIDRILEESKRRNERLKRELDR

SEQ ID NO: 25321 - protein, 60 aa, Artificial Sequence
  Synthetic
SKKETIRKLIEENKDIIRKLAEKLKRLLEESERIAEEALRLIKELLERIERALRRVAKDI

SEQ ID NO: 25322 - protein, 55 aa, Artificial Sequence
  Synthetic
KELEKLLEDLEREIRRLKKRLKELSDRLEEKIRKIKRELDDLSRRLREKIERTRK

SEQ ID NO: 25323 - protein, 60 aa, Artificial Sequence
  Synthetic
DDEKRLKDRLREALKRNEELLDRLRRRVEEILDRNRKLLERVRRELERVLKELEDLIRRG

SEQ ID NO: 25324 - protein, 56 aa, Artificial Sequence
  Synthetic
ETVLRELVEELERVVRRILELLKRLSDASKRVVEEILELLRRLSEKTAKAVDDTRT

SEQ ID NO: 25325 - protein, 56 aa, Artificial Sequence
  Synthetic
DDERRLETLIRLSRELIERVRKLLRDIIRTSKELIEEVLETVKRILDKIEELAKEV

SEQ ID NO: 25326 - protein, 55 aa, Artificial Sequence
  Synthetic
EKISRKVEELEKEIRRLIEELKKKNEEVEKKIREIMKELDERSERLRRELDRTRD

SEQ ID NO: 25327 - protein, 60 aa, Artificial Sequence
  Synthetic
SKEDELRKELEEVVKRIEDALRKLKERSKRVAKRVKKLLDDLKKESEEVVESLREKLEKE

SEQ ID NO: 25328 - protein, 59 aa, Artificial Sequence
  Synthetic
ESVRKLLEELRRLHERIIKIIEEILELLRRVHKEVAKDVRRLARELEELVRRLVETLRR

SEQ ID NO: 25329 - protein, 58 aa, Artificial Sequence
  Synthetic
SAEEILDTVAELIKTHLKIVREVLKTVRDLNRRSLDLIRRILERMRRLVERLVRLIRN

SEQ ID NO: 25330 - protein, 56 aa, Artificial Sequence
  Synthetic
EKRLREVEEEVERRLDTVRRELEEVEKESDRLLEELEKKSEDFERDIRRLLKEAKT

SEQ ID NO: 25331 - protein, 56 aa, Artificial Sequence
  Synthetic
SKREEIEKLLEDLKRDNKRVLDRLREVIKDNEDKNEKAVRDARELLERLKRELEEG

SEQ ID NO: 25332 - protein, 55 aa, Artificial Sequence
  Synthetic
EALKRLEEVAKELLKLIEEVLKENERSNREILRLIAELVKRNARVNEELLEIARR

SEQ ID NO: 25333 - protein, 61 aa, Artificial Sequence
  Synthetic
EKDDRIREKVKEIERRNDKALDDIRRRVEEIKRENDEVLDRIRKELEDLKKEVEEVAKRTG

SEQ ID NO: 25334 - protein, 59 aa, Artificial Sequence
  Synthetic
EELKKLLDKLLEDLRRIVKKLEELLKKNDDELRKIVKEVKDLLKRNHDELERIVREARR

SEQ ID NO: 25335 - protein, 61 aa, Artificial Sequence
  Synthetic
SKEEKIERDVDEIRKENEEVLRRIRKKVRDIERENDEILRKIEEDLRRIEKDLERVAKERG

SEQ ID NO: 25336 - protein, 59 aa, Artificial Sequence
  Synthetic
EDLRELLRKVLESLRRIVERVDRTLKDNDRKIEEIVRELKELLKKNNDALRKIVEDAKR

SEQ ID NO: 25337 - protein, 59 aa, Artificial Sequence
  Synthetic
SREEVFELLLDVLRKIVELIKDLAKKNIDVLKKLMELIDELVKINEKSLEDLLRLIREG

SEQ ID NO: 25338 - protein, 56 aa, Artificial Sequence
  Synthetic
EKELEDEARRLKKEYRDEVERLKKEIREIIERYKDALRKLEREIEDITRRLKERAD

SEQ ID NO: 25339 - protein, 62 aa, Artificial Sequence
  Synthetic
SKLEDLLRRAEELLKDIVRANERLLEEIRKLLKEIVKANEDLLRKVKRLLEEAVEMAIRERG

SEQ ID NO: 25340 - protein, 56 aa, Artificial Sequence
  Synthetic
EEIVTRVRKKVEELKEEVKRINDEVRKKVRDLEETSKRILERVEDLVRELKERARR

SEQ ID NO: 25341 - protein, 59 aa, Artificial Sequence
  Synthetic
SKEDKARELEKRLRDNLKKLEEVVRELAEVLKRNLEKLRRLAEELLRALKRLLDKLRAG

SEQ ID NO: 25342 - protein, 56 aa, Artificial Sequence
  Synthetic
EDLVRDIRRELKELEERARKILRDDERDLRALEKRIRDIIREDREELERLKERARK

SEQ ID NO: 25343 - protein, 60 aa, Artificial Sequence
  Synthetic
KREDILKKLEDIIRDIIDKLRRILEKVKRLNEDIIREIKRLLDESLKTLEDLLKRIADKS

SEQ ID NO: 25344 - protein, 58 aa, Artificial Sequence
  Synthetic
EEIKRLKEELERRHRRLEEEVERVARELEKRHRDLERDIRRVAEELKKLLKKLRDDRR

SEQ ID NO: 25345 - protein, 57 aa, Artificial Sequence
  Synthetic
REKEELSEEIRRRLDELRKLLEEYEEEVKRLLTRLRDKLRRYKEEVERLLRKLKEDN

SEQ ID NO: 25346 - protein, 55 aa, Artificial Sequence
  Synthetic
KEAVDLVRDVLRRVEKVNRELLELIKEVADRVRERNKELVELIDRLLERLKRADK

SEQ ID NO: 25347 - protein, 60 aa, Artificial Sequence
  Synthetic
SEEETVERLLEEARKRHEEIIKKAKELLDRAREEHERIIREAEKLLEEIKKRVDELVRDG

SEQ ID NO: 25348 - protein, 56 aa, Artificial Sequence
  Synthetic
RKTLLREIEKLLKTLEDILRDLLRLVEKTLKELEEILKDLVDKARENLKRLRERIR

SEQ ID NO: 25349 - protein, 57 aa, Artificial Sequence
  Synthetic
SKEEEIVKEVEKIVEKLLEVNRRALERIEEIVRKNLKVNRELVEEIERIVEELIRTG

SEQ ID NO: 25350 - protein, 56 aa, Artificial Sequence
  Synthetic
EEMLRRVLKKIEEVIRRAREEHEKSTRELEEVIKELKKRHEDVTREAKKVIDDLKR

SEQ ID NO: 25351 - protein, 56 aa, Artificial Sequence
  Synthetic
SEKEELKRLLDKLLKELKRLSDELKKTIDKILKILKEVSEEVKRTADELLDAIRRG

SEQ ID NO: 25352 - protein, 59 aa, Artificial Sequence
  Synthetic
EDELRKVEEDLKRLEDKLKKLLEDYEKKVRELEETLDDLLRKYEETLRRLEKELEEEER

SEQ ID NO: 25353 - protein, 56 aa, Artificial Sequence
  Synthetic
SRVERLEKLLEEHKRLVEDLIRLLDELAKKHDEDVRRLIERLKELAERLKRLLERS

SEQ ID NO: 25354 - protein, 56 aa, Artificial Sequence
  Synthetic
KRDVDRIREEIKKLIEDVRREIKRVEDKHKKDIDRVKEKLDRVRDRHEKMAEDSKR

SEQ ID NO: 25355 - protein, 60 aa, Artificial Sequence
  Synthetic
REKEELLRLLKEIAERILDILRKALELLDRVVELDNRTSKELLELSAELVKRILEAVRDG

SEQ ID NO: 25356 - protein, 60 aa, Artificial Sequence
  Synthetic
EEEKKRLLDDLRRILREYEERVKKLNDEHKKLEKEIKDKVKRILDEIRRTLDKILKELRK

SEQ ID NO: 25357 - protein, 60 aa, Artificial Sequence
  Synthetic
KDEERLVKKIRDSLRKYEDLLRKLVERIRDLLRRYEEELRKLLTEIEKTLEDVRDVLRRK

SEQ ID NO: 25358 - protein, 58 aa, Artificial Sequence
  Synthetic
DLLEMLRRLVERLKRLIERVLKLNRELVKKLLELLEEALRRNRRLVEDILKIADEARK

SEQ ID NO: 25359 - protein, 58 aa, Artificial Sequence
  Synthetic
SDEDRKRKKLEDVERRLEKLLREYEEKVRRVLEELRRLLEENKRHVEELEKRLRDRAK

SEQ ID NO: 25360 - protein, 56 aa, Artificial Sequence
  Synthetic
LEEALERLRRLLEELLRINERIIELIRELLEDNRRILEEILKLIKDLLRRAERIVD

SEQ ID NO: 25361 - protein, 56 aa, Artificial Sequence
  Synthetic
SEEEDLEREKRRLDKYSEDDRRRAEKVLRELEEEVKKSRKRLEDAKRRLDEEVRRN

SEQ ID NO: 25362 - protein, 59 aa, Artificial Sequence
  Synthetic
EEVLRILKTLVKELEDILRELLKINEDLVRRLERILRELLKSNDNLVKELEKLLEKARR

SEQ ID NO: 25363 - protein, 63 aa, Artificial Sequence
  Synthetic
EKKERIREALERAVRTLEKLLEDDKRELDKARREVRELLRRDKEELDKVVERVERELDRARER

SEQ ID NO: 25364 - protein, 58 aa, Artificial Sequence
  Synthetic
RKLEEILRLLEEALRRNSETLEEILRKLEEILKRNRKTLEDLLKLVKEILDEIRERLR

SEQ ID NO: 25365 - protein, 59 aa, Artificial Sequence
  Synthetic
SLTERVLDLARDLIRILLEIHKRALKLIAELVKKLLKIHEDVLKLSEELVEELLEIVAR

SEQ ID NO: 25366 - protein, 60 aa, Artificial Sequence
  Synthetic
EDTLRRVLERIREEVERVKEKHRRLLEELKKLLEELRKRSKDLLEDIKRKVRELEEKTRR

SEQ ID NO: 25367 - protein, 60 aa, Artificial Sequence
  Synthetic
REDEELTKRVEKILRDAERLVRKLHRENREILKTLKRLVEELEKENRKVLKDAEDLVRKE

SEQ ID NO: 25368 - protein, 56 aa, Artificial Sequence
  Synthetic
ARELLKELKRIVKKSLDELRKLLKKLEDIVRESNERLKEVLKKITDLIRKVLEDIR

SEQ ID NO: 25369 - protein, 58 aa, Artificial Sequence
  Synthetic
SEEDKIAEELKETLKRYRDRLEEIRKELEDKLREYEKRLEDLARELEKKLRKLEARDV

SEQ ID NO: 25370 - protein, 55 aa, Artificial Sequence
  Synthetic
EDVRRVVRELLRKLEDILRESEETNKETLEKIDEILKESERTNREVIRKLKETTD

SEQ ID NO: 25371 - protein, 56 aa, Artificial Sequence
  Synthetic
SAEETLRRITEESKRVLEEITKKYEDLERESREVLRKLREDLDRIKRELEDVLTKG

SEQ ID NO: 25372 - protein, 60 aa, Artificial Sequence
  Synthetic
RERLARLLKKLADKLIRVLEEILKINEELNRKIIKFARENLERNRRVNKKVIEVLREAAR

SEQ ID NO: 25373 - protein, 56 aa, Artificial Sequence
  Synthetic
SEDEKLKKEVDDVLERAKRLLDRLREANEDVLRKAKEDLDRLLKSNREILEELRKI

SEQ ID NO: 25374 - protein, 56 aa, Artificial Sequence
  Synthetic
ERVLERLLKALKEHSDELKKVVEELLKLLEEHLREVEKLVRELLADLKRLLDKTRK

SEQ ID NO: 25375 - protein, 61 aa, Artificial Sequence
  Synthetic
SKIEELLTKLAELLKEVIDELRKNLKRLEETVDENLKTMEDLLRKLEEVVREVLDIATKKN

SEQ ID NO: 25376 - protein, 55 aa, Artificial Sequence
  Synthetic
DEVRKRLDERAERLEKEVEEVKKENDERAKRSAEEVKKLLDKLDEALRRLEEEVR

SEQ ID NO: 25377 - protein, 61 aa, Artificial Sequence
  Synthetic
SEDDELIKKIKKLAEEIIDEIRKLIEKSKEILKRLLDELRKLIEKSKKLLKETLDKLRKDK

SEQ ID NO: 25378 - protein, 56 aa, Artificial Sequence
  Synthetic
EEALKELEKKTRDLEDEIRKVKDDVKRRHDELKEEIERVLDELRKVLKRLEDEARK

SEQ ID NO: 25379 - protein, 61 aa, Artificial Sequence
  Synthetic
KTEEILKRVKEILDELAKELRDIIRESLRTIEELLDELRRILEESERTLEELVKTIKDEVK

SEQ ID NO: 25380 - protein, 59 aa, Artificial Sequence
  Synthetic
DEVKRRLEEKERRIRTRYEELRRRLRKRVKDYEDKLREIEKKVRRDAERIEEELERAKK

SEQ ID NO: 25381 - protein, 57 aa, Artificial Sequence
  Synthetic
EELEDVLRRIEEVLREIIRLLEEHHDMVRRAVERIKRLLEDHHKKVEDILREIKRRI

SEQ ID NO: 25382 - protein, 59 aa, Artificial Sequence
  Synthetic
EKVKKELKDLARKAEKLSEDVRRELEETVKDLRRKSKEVEDRLDKLTEEIRRTLEEKRR

SEQ ID NO: 25383 - protein, 59 aa, Artificial Sequence
  Synthetic
KDEERLTKTAKESLDHNKELLDRIRKKSKEVLDHNKELLDRIREEIKRLLEELDRLKRE

SEQ ID NO: 25384 - protein, 56 aa, Artificial Sequence
  Synthetic
VEEVIKEVKKMLERALEELREVNDRDRRANERALRILEALNEEDKRATKRVLERKK

SEQ ID NO: 25385 - protein, 60 aa, Artificial Sequence
  Synthetic
REKEELLKLIKRVIELLKRVLEEHLRLVEDVIRRLKELLDSNEKIVREVIEDLKRLLDEV

SEQ ID NO: 25386 - protein, 59 aa, Artificial Sequence
  Synthetic
EDLLRKAKKVITEVREKLKRNLEDVRRVIEDVKRKSRRILEEARRLIEEVERELEKIRK

SEQ ID NO: 25387 - protein, 58 aa, Artificial Sequence
  Synthetic
SKVERILRLIEELLRLLREALRKIHRINEELIRTLEEVLREIHRINEDLNRKLREATG

SEQ ID NO: 25388 - protein, 59 aa, Artificial Sequence
  Synthetic
EELKDRVREELDRSRKKLRKLEEEMRRKLKRSREELKKLEEDLRRELKKLREELERIRR

SEQ ID NO: 25389 - protein, 57 aa, Artificial Sequence
  Synthetic
SRKERIKRALEEHIRKLKEITDEVRKTNEELLELTRRILEEAKKANEELVKKIREAL

SEQ ID NO: 25390 - protein, 56 aa, Artificial Sequence
  Synthetic
EEALKELEEKLDRYRRKLEDLLRKYAKKLEDYKRKVKKLEEENEELLKRIEKEMEK

SEQ ID NO: 25391 - protein, 56 aa, Artificial Sequence
  Synthetic
SEKEELEKRLRKKLEEIKELVERYKRRLEELLRRHREELKEIEKRLEDLERKIEEL

SEQ ID NO: 25392 - protein, 55 aa, Artificial Sequence
  Synthetic
EEVKKIIEELLRLAEEVLRRNKRLIEALLELHEDEFRKVEEIIKELSEEAKRASK

SEQ ID NO: 25393 - protein, 57 aa, Artificial Sequence
  Synthetic
REKEKIREALETNLRLLEELIKRLKEILDTHNELLRRVIETLERLLKELLELLEEAG

SEQ ID NO: 25394 - protein, 56 aa, Artificial Sequence
  Synthetic
KEDLERLRRKVEELEDRLRRLLEKLKRDSDELMRELERILDRYRRESEELDRRLAE

SEQ ID NO: 25395 - protein, 58 aa, Artificial Sequence
  Synthetic
SELERLRKILDDLRKKVERVAEEHKRANDKLAEEIRRVLKTHREMNERAIEEVKRTVG

SEQ ID NO: 25396 - protein, 55 aa, Artificial Sequence
  Synthetic
REVDKRLRELLEEHKKLVDDLDKRARKVHKEHKDKVDKLREELEKTLRDIKRETD

SEQ ID NO: 25397 - protein, 60 aa, Artificial Sequence
  Synthetic
DSDEIVKTLLEKLRRILKEVEEIARENHKRDRDANREINKLVEDIARRLEEVAERLREVI

SEQ ID NO: 25398 - protein, 59 aa, Artificial Sequence
  Synthetic
EKDLRRLRKDIERLKEEVKRALDELRKKYKKIEDDNRRLVERIRRELKKILDELDEKRQ

SEQ ID NO: 25399 - protein, 58 aa, Artificial Sequence
  Synthetic
SEIEKVLEINRRVLKELERIVKKVLDIDKEAAELLRDIIRRVLEIIKKVIDDIIRTRG

SEQ ID NO: 25400 - protein, 59 aa, Artificial Sequence
  Synthetic
KDLEEKLRRVLEELKRLVDDLRRLIDEIKKRYERMVEELKKEIERVLRENEEAVKDLER

SEQ ID NO: 25401 - protein, 59 aa, Artificial Sequence
  Synthetic
SEEEELEKIAREVLRELKEILEELDDIYRRVTDRLRKLLERLKKEYEEVKKELEDLKRR

SEQ ID NO: 25402 - protein, 56 aa, Artificial Sequence
  Synthetic
EELVDRLIKLLDENLKRSEEVIREIIELARKNAEDSRRVIKKIIELLREMLKDARR

SEQ ID NO: 25403 - protein, 62 aa, Artificial Sequence
  Synthetic
DSERELEKVLKDAKEKLDRSLEEVKKVTRETEKRIEEIDKEVKEVLEEADRRVKKIETDKER

SEQ ID NO: 25404 - protein, 56 aa, Artificial Sequence
  Synthetic
ERLIREIKRIIERVIEILKDIAKEILDLDRESVRLDTEVLKKLLDIIREVVKEAKK

SEQ ID NO: 25405 - protein, 62 aa, Artificial Sequence
  Synthetic
DEEREVRKVLRRAEELLRRSLKKAEEVTRETRKRIKELLDELRKVLERAERELRRIRREKER

SEQ ID NO: 25406 - protein, 56 aa, Artificial Sequence
  Synthetic
DRLIEEIKRILEEIIKLIADLARRVLKIDEESVKLDEDNLREVLKILEDVVRDSER

SEQ ID NO: 25407 - protein, 56 aa, Artificial Sequence
  Synthetic
SEEEEIKKDLERLIDKLRRTSKRLIDDYRRVLEELERTIKRLLEELEELIDELRRR

SEQ ID NO: 25408 - protein, 59 aa, Artificial Sequence
  Synthetic
EKVERALERILELLKRVIEELERLAEEVLRLSKRVAEENKKLLEEILRILEEIIRRAKK

SEQ ID NO: 25409 - protein, 62 aa, Artificial Sequence
  Synthetic
SKEEELEKLVRKVEEDLKRLEEESERIKKEIKDTLRKIRKRSEDLKRKVKELLRRLEEEARR

SEQ ID NO: 25410 - protein, 60 aa, Artificial Sequence
  Synthetic
VDEALEMLKRLLDKALKVHEDVLRKLVELVDEVLKVHEESLRKLLTLAKKVLEVLRKITK

SEQ ID NO: 25411 - protein, 60 aa, Artificial Sequence
  Synthetic
DDERRKLEDLERMVEELKRKSDKLLKEIREEVERLERETRKLLEELKRKVDELREDLRRN

SEQ ID NO: 25412 - protein, 55 aa, Artificial Sequence
  Synthetic
EDLEKAERLVKDILRLNEEHTKELEDVVRDLLRKLEKHTRDLEKLVKDALDKVKT

SEQ ID NO: 25413 - protein, 60 aa, Artificial Sequence
  Synthetic
SEKEELLKRLEDVLRRIKERLDELRRRYKKALDELREESKRLIEKLDKVLREIEELIKRK

SEQ ID NO: 25414 - protein, 59 aa, Artificial Sequence
  Synthetic
EEILRLLLELLEESIRVAREVNRLLLRLLEKNKELVEEVLKRLLDLLKKIIDIVREVIT

SEQ ID NO: 25415 - protein, 62 aa, Artificial Sequence
  Synthetic
SKIDEALKKLRKILEDAIKLNKELNDTTREILKEIIKLNREVLEKIRRILKELVDLILKDLK

SEQ ID NO: 25416 - protein, 55 aa, Artificial Sequence
  Synthetic
EELRRVVEKVRKELEDDKERYKRLEEEVRRLLEEMKRRSEDLERKVEEILRRLTE

SEQ ID NO: 25417 - protein, 58 aa, Artificial Sequence
  Synthetic
SEKELLEDLRRKAKEVKDRHEELLRDLERTLKKLKDEHDKKLKDLRDELRRVEKKLDD

SEQ ID NO: 25418 - protein, 55 aa, Artificial Sequence
  Synthetic
KELLKEVKDLLRKLEKVVRDSLELLKRLLEDIEKRVRDSNRELKRILDDIEKKAK

SEQ ID NO: 25419 - protein, 57 aa, Artificial Sequence
  Synthetic
DKEEELLKKLEEVLKKAEDLIRESNKALKELLDEAVKIVEDSLRELERTLRDIERKV

SEQ ID NO: 25420 - protein, 55 aa, Artificial Sequence
  Synthetic
EDLRETEKDLRRLSEEHKRLLEELRDKARRLTERHEKALKEIEDELRKIKDEARR

SEQ ID NO: 25421 - protein, 59 aa, Artificial Sequence
  Synthetic
DEEEKIREDLERTLREYERELRRAKEELKETLKRYEEELREVKEDLDRTLEEVDDLLRR

SEQ ID NO: 25422 - protein, 60 aa, Artificial Sequence
  Synthetic
KKTLLRDLKEALKTLIKLIREILEDNLRVLRRIIELIETLLEDNRRVLEEIIKLIEEATT

SEQ ID NO: 25423 - protein, 59 aa, Artificial Sequence
  Synthetic
STKEEVERIVEELRRAHEKSLRDVKKILDDLAKIHDDSLEDARRIIEKLDRILEEIKDR

SEQ ID NO: 25424 - protein, 56 aa, Artificial Sequence
  Synthetic
DKLLEDVKEEIRKVKERIEDLLRRSRELLERLRKRLDDLLADSERKIDEVTKRTRK

SEQ ID NO: 25425 - protein, 58 aa, Artificial Sequence
  Synthetic
DELEKVERLLEEIEKIIEDLIRRVEELVRRILEFNKTTLKRNEELVRELEKLVEETTG

SEQ ID NO: 25426 - protein, 59 aa, Artificial Sequence
  Synthetic
KEVVRKLEEDLRRVRERSKKLVREHEKFLEDLEETIKEEKRRVDEELKRIKEEIKETRR

SEQ ID NO: 25427 - protein, 56 aa, Artificial Sequence
  Synthetic
SEKERLMRLLDKLKDLNRRLVERIKELLDKALELHKKLVKELRELLERLKELVERA

SEQ ID NO: 25428 - protein, 59 aa, Artificial Sequence
  Synthetic
EETVRRLREALKKLEDDLRKIERDAEREYKKLKDELEELTERYRREIRKLKEELKKDRK

SEQ ID NO: 25429 - protein, 56 aa, Artificial Sequence
  Synthetic
SKREELKELLERLLKLDRDTLEELKRLLDELKKTNDDTLEILKRLLEEVLRVIRET

SEQ ID NO: 25430 - protein, 59 aa, Artificial Sequence
  Synthetic
KDRVREIERRLEELRKRLEKVERDLRDRHRKVKKKLDDVIEKVKRRHDELRKELEDAER

SEQ ID NO: 25431 - protein, 59 aa, Artificial Sequence
  Synthetic
KDEEEVEKEIRRLLEKVKDVLRRSLEELERLLREIKEVLEKLEREDEENIERIKRELER

SEQ ID NO: 25432 - protein, 60 aa, Artificial Sequence
  Synthetic
RETLIREIEKILRRLNELNRRLLREVERILERLLELHKRLLDELLRIAERLMRLVEEVKK

SEQ ID NO: 25433 - protein, 56 aa, Artificial Sequence
  Synthetic
SEAEDLEELIKELAELLKDVIRKLEKINRRLVKILEDIIRRLKEISKEAEEELRKD

SEQ ID NO: 25434 - protein, 59 aa, Artificial Sequence
  Synthetic
KDEAERRRRELKDKLDRLREEHEEVKRRLEEELTRLRETHKKIEKELREALKRVRDRST

SEQ ID NO: 25435 - protein, 57 aa, Artificial Sequence
  Synthetic
DEVEKLKKLLKELEELNREVVDTVKKLLDELVKLNRDVLREVRELLKKLIDALEKTG

SEQ ID NO: 25436 - protein, 59 aa, Artificial Sequence
  Synthetic
EELRRELKKLEEEIERALERIRRRSEETADRIRRTLEKLREKSERKRREIEDTLRKDRK

SEQ ID NO: 25437 - protein, 59 aa, Artificial Sequence
  Synthetic
SLLEKVKKVIERLLEIHKKLLEELKRLIEKVLRITRENLEEVKRLIKRAVEILRRIAEE

SEQ ID NO: 25438 - protein, 60 aa, Artificial Sequence
  Synthetic
EEEVTRKIEELRKKLTKLIRELEETLKEVKKRNEDALRRLEKESKDLAERVRRLIEELEK

SEQ ID NO: 25439 - protein, 60 aa, Artificial Sequence
  Synthetic
SDKEEIKRRVEKTARDLETEHDKIKKRLEDTVRDIKRELDELLEKYERVLRKIEKTLREG

SEQ ID NO: 25440 - protein, 60 aa, Artificial Sequence
  Synthetic
EKRLIEEVVRLLRENLDVVRRILEALAKLIKELLEALEEVLRRNKELIRELLRVLDEALK

SEQ ID NO: 25441 - protein, 60 aa, Artificial Sequence
  Synthetic
DEEERVKKLLTDLRRLLRKLHEESKKLLDELRKKLRELRRRSEEKLREVERRLREAEKKL

SEQ ID NO: 25442 - protein, 59 aa, Artificial Sequence
  Synthetic
EELLRVLEELVRTLKKLLDENLKMVERLIRELEKVLDDHERKVRRLIEELLEVLDRDAK

SEQ ID NO: 25443 - protein, 60 aa, Artificial Sequence
  Synthetic
DEDRIIEEIARLLEELLRELLELIKKLIETNRRLNEEHERAVRELARLLEELLDRLVKKV

SEQ ID NO: 25444 - protein, 59 aa, Artificial Sequence
  Synthetic
EKIKKEIERELEELRRMIKRLHEDLERKLKESEDELREIERRLEEKIRRLEEKLERKRR

SEQ ID NO: 25445 - protein, 59 aa, Artificial Sequence
  Synthetic
STEEKLRELVKRLEELLRDLERLLRELEKSNRDLNETALRLVEESDKLLEELLEKLARN

SEQ ID NO: 25446 - protein, 59 aa, Artificial Sequence
  Synthetic
KDTVKRLKEDLDKARKDHEKKLEDLERLLKRNEERLRKMKKELEDKVERLRRELEKKRK

SEQ ID NO: 25447 - protein, 59 aa, Artificial Sequence
  Synthetic
DEEEKIRTTLDLLRKLLKVLREILEELIRSNKELNERLLRLVEDSDRLLEELLKKLEDD

SEQ ID NO: 25448 - protein, 59 aa, Artificial Sequence
  Synthetic
EEKVRDTEKKLRDLREKHKEIAKELERLLRENRRRLEELKREAKKVLDELRKRLEDERR

SEQ ID NO: 25449 - protein, 59 aa, Artificial Sequence
  Synthetic
SEKEEVEKRLKDLEEESERLLKEVRDTLKRLEEESKKLIDELRRKLEELRKEVKELVDR

SEQ ID NO: 25450 - protein, 56 aa, Artificial Sequence
  Synthetic
DKALTKVVDDVLRVLERVIERLLRLNKESLKELERILEDLRRLNKKTLDVLREVTR

SEQ ID NO: 25451 - protein, 59 aa, Artificial Sequence
  Synthetic
KEKEEVEKKLKEAEEEHRRLNREVEEDLKRAKRESERLLEEMEKKLDELEERVERLLRE

SEQ ID NO: 25452 - protein, 56 aa, Artificial Sequence
  Synthetic
REVLEKLVRDALRTLREVLDRLRRLNEELLEVLRRVLRELERLTRELLKVLRDALK

SEQ ID NO: 25453 - protein, 60 aa, Artificial Sequence
  Synthetic
SEAEEVARRIKELVRELEKLLRDSEETIKRLIDKNRDLLRRIAETIDKLIKDLRDLLRRI

SEQ ID NO: 25454 - protein, 60 aa, Artificial Sequence
  Synthetic
DEDVRRALERVEKLLREILERLKRHSEELAELARRLLDENRRIIEEIIKLIEDILRELKR

SEQ ID NO: 25455 - protein, 61 aa, Artificial Sequence
  Synthetic
DLERLVEELARLLKEALDTLARHSERLIKLAREILETLRRHSERIAELIERILRELMERRG

SEQ ID NO: 25456 - protein, 59 aa, Artificial Sequence
  Synthetic
EELKKKLEDISREIKKSLEEVEERLRRISDDVRRSLEELKRILDEIEREIERRLREAKR

SEQ ID NO: 25457 - protein, 60 aa, Artificial Sequence
  Synthetic
SDEERLRKEIRDRVEELRKRLDDTEEEYDKRIRDLRRKIKEVEDRYREKIKRLEEKLRRG

SEQ ID NO: 25458 - protein, 60 aa, Artificial Sequence
  Synthetic
KDTVLRILKELMDRDEEILRRILKLIKELLDESKKTVRRVLELLKELLRKILKLVEEITR

SEQ ID NO: 25459 - protein, 56 aa, Artificial Sequence
  Synthetic
SKKEILKEVLRRILKLIRELIETIKKVLKRSLDLNKELIDINKEALDRILKLLTDI

SEQ ID NO: 25460 - protein, 59 aa, Artificial Sequence
  Synthetic
KRRLKKLADELKEILDRLREKNKEIADRAKELHDEVRERLKEIAKRLKDVLRDARERVR

SEQ ID NO: 25461 - protein, 60 aa, Artificial Sequence
  Synthetic
REMEEVLKRNLDAARRVLETLKRILDRLKELNERSLRSLRDILRELLDIAREVLDLRRAG

SEQ ID NO: 25462 - protein, 56 aa, Artificial Sequence
  Synthetic
IEKVRKDVEDLAKELEDRLRDVERESRRLLEELRETLERALRRVKELHDELREAIK

SEQ ID NO: 25463 - protein, 56 aa, Artificial Sequence
  Synthetic
SRKEELLRILRRILEIAEEIIRDLKKWLDDDRELVREILELIKRLNEDNNRLIREA

SEQ ID NO: 25464 - protein, 58 aa, Artificial Sequence
  Synthetic
DELRRLEEALKESKRLVEEVLKRIEDVLRESKKLADEIRKKIEDLVRELEEELERVAR

SEQ ID NO: 25465 - protein, 60 aa, Artificial Sequence
  Synthetic
SKEEKKKELEKKAREIKRRLEENKREYKEKVDRLKEELRRLLEEIREKVKRLEERIRRAI

SEQ ID NO: 25466 - protein, 56 aa, Artificial Sequence
  Synthetic
KDLVKELEDVLKELLDLLREILKTVKRVNEDSVRSAEKLIEDLERMIRELLKEARK

SEQ ID NO: 25467 - protein, 56 aa, Artificial Sequence
  Synthetic
DERERIEEDLKRLRDTLDTKEEESRRRIRELEEDLKRKIEESRRRIEKLKRRMEED

SEQ ID NO: 25468 - protein, 55 aa, Artificial Sequence
  Synthetic
EILDRLRKVLEELARRDRKILEDLERAVRELDKLDRDILRTLLRVAEELLRRREK

SEQ ID NO: 25469 - protein, 61 aa, Artificial Sequence
  Synthetic
DKLEEILKLLKEVIKTLLRLSEDLNRLNRELVRTVLELLKRVVELLKRVLEEVRKKVRDAN

SEQ ID NO: 25470 - protein, 59 aa, Artificial Sequence
  Synthetic
DKVERDVRRIKEKIKRILDDLRRRVEELKKKNKEDLEKYDEDIRRLEEEIKRLLEEARR

SEQ ID NO: 25471 - protein, 56 aa, Artificial Sequence
  Synthetic
REEKELLDEIRKRVKESEDRLEKLLRDYEKELRRLEKELRDLKRRIEEKLEELRRR

SEQ ID NO: 25472 - protein, 56 aa, Artificial Sequence
  Synthetic
KDALSRLLEELLRVVDDLIRVLKELIDKSRKVIEELLELLKRINEENLKVLAEIIK

SEQ ID NO: 25473 - protein, 59 aa, Artificial Sequence
  Synthetic
SRKEKLLKESEEEVRRLRRTLEELLRKYREVLERLRKELREIEERVRDVVRRLKEVLDR

SEQ ID NO: 25474 - protein, 56 aa, Artificial Sequence
  Synthetic
ERLVKTLIEDVERVIKRILELITRVAEDNERVLERIIRELTDNLERHLKIVREIVK

SEQ ID NO: 25475 - protein, 61 aa, Artificial Sequence
  Synthetic
SEKEKLREIIKRHLRSVEEVLRLLAKILKDLTDASEENLRLLKELLRRLLEVIRKLVEDVK

SEQ ID NO: 25476 - protein, 56 aa, Artificial Sequence
  Synthetic
EDALRKLKKKLEEIEKTVKDSIDKLRELLEELERRVRKIAEENKRLLEELVREVKK

SEQ ID NO: 25477 - protein, 60 aa, Artificial Sequence
  Synthetic
KDEERLEDELRELTERMREKLKEHEERVRELSKEVKRKAEDSEEKLKKDLKEVEDTLRKK

SEQ ID NO: 25478 - protein, 55 aa, Artificial Sequence
  Synthetic
EELLERIERIIRTSKKLLTEALEIIREIIKRSKDSNRDLHRDLEAILRRIEEAKK

SEQ ID NO: 25479 - protein, 61 aa, Artificial Sequence
  Synthetic
SDEERLVAELERLIEISLRILEELLEVLRRLVEESLRLLEELVKVAEEIIERLLRLLEETV

SEQ ID NO: 25480 - protein, 55 aa, Artificial Sequence
  Synthetic
ERLKKTADEIKKRLDKVRKDSDDLAEEIKRILKRVEDESRDTARKVKKVLEDAKR

SEQ ID NO: 25481 - protein, 59 aa, Artificial Sequence
  Synthetic
SKEDEVLERLKRAIERSIKIVEEIVKRNVETNERSERILRELAETLRRVLDTIRKLLED

SEQ ID NO: 25482 - protein, 56 aa, Artificial Sequence
  Synthetic
EEELKRRLEEIERKLKEVLDRLKKKHDDDNKENKDVLDEVRKRHKELLDKLREKRK

SEQ ID NO: 25483 - protein, 57 aa, Artificial Sequence
  Synthetic
DEEEKVLRILEELLKEHKRVLEELLELVRRIIERHKEVLKRVLKLVEDLIRRIKEAN

SEQ ID NO: 25484 - protein, 56 aa, Artificial Sequence
  Synthetic
EEAAKEVEKRLEEVKTDLRRLARESEETLRRVEERLEELKERSERELKRVEEEIRR

SEQ ID NO: 25485 - protein, 56 aa, Artificial Sequence
  Synthetic
SEEEELKRILDENHESLKDLLREIKEILRANHETVKKLLETIKEILDTVLKILRDV

SEQ ID NO: 25486 - protein, 55 aa, Artificial Sequence
  Synthetic
EELLETLKRLIRELVKRLEKILDDDRKLIDRLVRRLEEILKEDKRRIEEALERLR

SEQ ID NO: 25487 - protein, 60 aa, Artificial Sequence
  Synthetic
SELERAEELIKKLLKLHEDVLRRLTEVDDELLEIHDRVLKRLKEVDDELLKLIRDMLRRA

SEQ ID NO: 25488 - protein, 58 aa, Artificial Sequence
  Synthetic
EEAKDIREKLERLLRKSEELVRKSLKELKELLDKSKKLLEDSKRRLEEILKEIKDDSR

SEQ ID NO: 25489 - protein, 60 aa, Artificial Sequence
  Synthetic
DEEDEVEKLIREAIELNKRILEEIKELIERIVRRNKEILREAKEAIERLIKIARDLTKDK

SEQ ID NO: 25490 - protein, 56 aa, Artificial Sequence
  Synthetic
EEKLERIARELKKLLEEVERRSRKAIEDLKRELKRVMDRSREAERKLRELLKETKR

SEQ ID NO: 25491 - protein, 58 aa, Artificial Sequence
  Synthetic
SEDEVLKKIEDELREVEKKLEDVLREIKRRHDELKKRLDEKLERLRRRHEELKEALDR

SEQ ID NO: 25492 - protein, 60 aa, Artificial Sequence
  Synthetic
EEEVKRDLKRILDRLLEVNTKSIEDLKRILDKLLEVNRRNVDEIRRILDELRKVIERVTK

SEQ ID NO: 25493 - protein, 60 aa, Artificial Sequence
  Synthetic
DETERVKEVLDRSLKLNEDLLRKIDEILKRLFEINKEVIDIIRELLERLVRIAREVLEKN

SEQ ID NO: 25494 - protein, 55 aa, Artificial Sequence
  Synthetic
EEVEKRIKKLLDDLEKVAREIRKKHKELLEELEKVAREVMDAHRRLLEDLKRTDD

SEQ ID NO: 25495 - protein, 59 aa, Artificial Sequence
  Synthetic
SLKEIVKEIIDRASELLKRLLERSEDSLRTASELLRKILEDSRRSLRTIARLLEELLRT

SEQ ID NO: 25496 - protein, 55 aa, Artificial Sequence
  Synthetic
REIEKEIRRILEELKRKHDEIEKKIRELEREIKRKHEELEDRIRKIERDLDRRTK

SEQ ID NO: 25497 - protein, 58 aa, Artificial Sequence
  Synthetic
SLRELVEKILRDAAKLIERLLKLSEEVLKRIEELLEELLRLSERSLRELLRLLEELLR

SEQ ID NO: 25498 - protein, 55 aa, Artificial Sequence
  Synthetic
KDIKKELDDIVRDVKRKHDKLREELKKIVEDAERAHRDIDRKIREILKELKERTD

SEQ ID NO: 25499 - protein, 57 aa, Artificial Sequence
  Synthetic
REEELRKKIEDELRDLKRKLEDLLRRYEEKLREAEKKLKDLLRRYEERVREIKKELS

SEQ ID NO: 25500 - protein, 60 aa, Artificial Sequence
  Synthetic
EDELLRVLEKVIEDNLRIVEELIRRLEEVLKRHEDLVRTLLDLLKRVLEAVKKLLDEAVT

SEQ ID NO: 25501 - protein, 60 aa, Artificial Sequence
  Synthetic
SSEELLKRIVDEDERVLEEWRRVLEEIKDLSKRVVDLLDKVLKEIEKIVDEVTRRLERDG

SEQ ID NO: 25502 - protein, 55 aa, Artificial Sequence
  Synthetic
KDLLETIKKRVEEIRRTLEKIKRDYDKAIEEIRRKLERKLEEYKEVIDDLRRKTK

SEQ ID NO: 25503 - protein, 59 aa, Artificial Sequence
  Synthetic
SSDELLEEIIKEIARLIEELLEILRENLERSEESLRRVLRAIDDNLRRVERLIEALARG

SEQ ID NO: 25504 - protein, 56 aa, Artificial Sequence
  Synthetic
KKAMDEELEKIRRDHERLKKEIEDRLRELKDKHRRAFEELKKMLDDIKRKVDEAKR

SEQ ID NO: 25505 - protein, 59 aa, Artificial Sequence
  Synthetic
DEEEILREILRVAEELSRLNEEVNKRVLEVLERLSRMNEKLLKEVKDVVDRLIELRRRK

SEQ ID NO: 25506 - protein, 60 aa, Artificial Sequence
  Synthetic
DKEVKRRIEKALRDIEELIERILRRNEEVKREIERLDEENRRRNKEALERIRRLIEETKR

SEQ ID NO: 25507 - protein, 59 aa, Artificial Sequence
  Synthetic
KDEEELKRRVEKVIRDLERKLKDLEEDHRRVLEELKRELEETKRRLDKVIEEIERVLRR

SEQ ID NO: 25508 - protein, 60 aa, Artificial Sequence
  Synthetic
KERLIRVLEEILRLVLRLHEEVVRLVRRLLEESHRILRKIVELLREILEDLKKILDDIRR

SEQ ID NO: 25509 - protein, 56 aa, Artificial Sequence
  Synthetic
DEEDEIRKRLKELLDDVKRRLDELRRESERLLKEVDDLLRESKKRLEDEKKKLEER

SEQ ID NO: 25510 - protein, 55 aa, Artificial Sequence
  Synthetic
KEVLERLEKIVRRNEEVNDEVRELVTRLNETSNRAARELLELAKRIIEEIKKAVK

SEQ ID NO: 25511 - protein, 57 aa, Artificial Sequence
  Synthetic
SKLETIKELLERLHELNERAVRELKKTLEDLHRDNARLIEELIRKNERLLEALREKV

SEQ ID NO: 25512 - protein, 55 aa, Artificial Sequence
  Synthetic
EDADRDVKRLKEESEELLRRSKKRADDLKREVERLLEESRRRLDELLKELKDRSK

SEQ ID NO: 25513 - protein, 61 aa, Artificial Sequence
  Synthetic
SRLEEIKKLLEKVMELIRRIAEELLRINEKVLEVLERIVRTILRLNEEHLKDVRDIARKLK

SEQ ID NO: 25514 - protein, 55 aa, Artificial Sequence
  Synthetic
TEIRKRLKELRDKNEELKKKVEEMIRRLEEESKKTKKRVEEILKRIEEEVREKAR

SEQ ID NO: 25515 - protein, 57 aa, Artificial Sequence
  Synthetic
SREETLRERIERIKRKSEEDVERIKRTLDREREENEETVRRIKETVDRLREEVEREL

SEQ ID NO: 25516 - protein, 58 aa, Artificial Sequence
  Synthetic
RELDRVEEIIRRIVKKLEEILRDLKRRAEDHIRRLTELIERSLKIVRDLAEDIRRAIE

SEQ ID NO: 25517 - protein, 59 aa, Artificial Sequence
  Synthetic
DADELLRRLAEEVERVIREAEDLLRRWKETIKKVLDDLKRLLDELKKRNEDVIRELTKT

SEQ ID NO: 25518 - protein, 56 aa, Artificial Sequence
  Synthetic
KDDLEDILRKNLDRLRKLLERLREILRENLEALKKTLKRLEDVVREILEDLKRERK

SEQ ID NO: 25519 - protein, 59 aa, Artificial Sequence
  Synthetic
TEKELLEELEEDVKRVIEELERLLREWKEELRRVLEESERLLRELRERNKRELEDIRRI

SEQ ID NO: 25520 - protein, 56 aa, Artificial Sequence
  Synthetic
LEEVTRILERNLKELERNLRDLDRTVKTNERLLRELLKKLRDIVRTILELLERKTK

SEQ ID NO: 25521 - protein, 57 aa, Artificial Sequence
  Synthetic
SEKEDVRRKLEEDREKHERDLRRIEEELRRTIEESERRLKEVKKRLKELIDDVRRRD

SEQ ID NO: 25522 - protein, 60 aa, Artificial Sequence
  Synthetic
KEELKKAVETILEELVRIADKLIDIHREILEKLLRVAEKLLEVSRRALDKLKKLIDKTDK

SEQ ID NO: 25523 - protein, 56 aa, Artificial Sequence
  Synthetic
DKAEVLREALKLLKDLLEELIKIHEESLKRILDLIDTLVKVHEDALRKLKELLERS

SEQ ID NO: 25524 - protein, 55 aa, Artificial Sequence
  Synthetic
EEIDRELKRVVEELRRLHEEIKERLDDVARRSEEELRRIIKKLKEVVKEIRKKLK

SEQ ID NO: 25525 - protein, 59 aa, Artificial Sequence
  Synthetic
REKEEIERTLEELKRILDELVKDDKKSLDRLREIMERSVRIAEETLRKLRETLELKARG

SEQ ID NO: 25526 - protein, 56 aa, Artificial Sequence
  Synthetic
KDEVLKRLDDLIKEWRDVLEKLLRDLRELLERSKKRLRKVREDLKRLLEELERRAD

SEQ ID NO: 25527 - protein, 56 aa, Artificial Sequence
  Synthetic
STREKAKKVLDTLRRDNEDMKRVVEKILRALKRTNERAEKLAREITEEIKRILKEV

SEQ ID NO: 25528 - protein, 56 aa, Artificial Sequence
  Synthetic
EDLLRKLEEELRRIKEKLRKALEELEREHRELEKELDKLHDESRKEHERIEEELRR

SEQ ID NO: 25529 - protein, 60 aa, Artificial Sequence
  Synthetic
DKERVLEDVKRRAKELEELLKEVEDRYEEDLRRIEETLKDTERRYREKLEKIKEELKRTV

SEQ ID NO: 25530 - protein, 59 aa, Artificial Sequence
  Synthetic
EKIKRIVEKIIKEHRDVLERLKRIIEEITRSDRESLERLKEILKELIRILKELADRERK

SEQ ID NO: 25531 - protein, 60 aa, Artificial Sequence
  Synthetic
KSEDVVRELIKLHRELNDKARKVIETILERNRELVETAERVIRRLIKLLEDALRILKKSS

SEQ ID NO: 25532 - protein, 56 aa, Artificial Sequence
  Synthetic
EEELRRLEEEIRDIVRRLRKRVEEYRKELEDLEKELADEVKKYEDEVKRIREELRK

SEQ ID NO: 25533 - protein, 60 aa, Artificial Sequence
  Synthetic
STEELLREIEEIIRRILEIADKTSKEWADLIKRILELIKRNLEELRKLVREVLEEVRKEG

SEQ ID NO: 25534 - protein, 56 aa, Artificial Sequence
  Synthetic
KDTIDKLRKRLKEIKDRTKELLDRIREEIRELRERNKEIVKDIERRLRELKDRIRK

SEQ ID NO: 25535 - protein, 57 aa, Artificial Sequence
  Synthetic
SKKELVREVVKELHELNKDVLRVLTEIVERVKELDKRVLEVLRRIVEEVERLAKEAG

SEQ ID NO: 25536 - protein, 59 aa, Artificial Sequence
  Synthetic
KDRLREIEERVRKILEEIDKLLDDLRKAYDRILERIERLVRELSRKHKEVADKITELVK

SEQ ID NO: 25537 - protein, 60 aa, Artificial Sequence
  Synthetic
SEDERVTRLKEELERLLDELRKRYEKLREEIRRVLEDLKKKYDELKEELDKMLRDLERRG

SEQ ID NO: 25538 - protein, 55 aa, Artificial Sequence
  Synthetic
EELLRELERVSREDERLVKEAADELRRILDTDRKLLKEVVDTLERVLRRILKETR

SEQ ID NO: 25539 - protein, 61 aa, Artificial Sequence
  Synthetic
SEEERVEELLRRIEKLLKESEEDVERLKKRHEEENRRLKEEVKRLMDELREILRRLEEETG

SEQ ID NO: 25540 - protein, 58 aa, Artificial Sequence
  Synthetic
KDVDKLVEVLDRVLRRVRELLEELAETNRESIRRYERLSEKNAELVTEIIERLRRTVK

SEQ ID NO: 25541 - protein, 56 aa, Artificial Sequence
  Synthetic
SKMEKLLKDLREALEKVKRRYEELERRLDEVLKEHEEIVKRLLEELEKVLKRIEEG

SEQ ID NO: 25542 - protein, 59 aa, Artificial Sequence
  Synthetic
ERVEELIERLIRIIERLLREVIKSHEKLVRTIERLIEESIRVNEELLEVIERLLDRARK

SEQ ID NO: 25543 - protein, 57 aa, Artificial Sequence
  Synthetic
DLERVVEDIVDKAKRLLDKNLEVLKRIVDEVLRLLERLLRESRKVVKRVKEIIEELV

SEQ ID NO: 25544 - protein, 59 aa, Artificial Sequence
  Synthetic
KDLLTELEKKLRKLKRDSEKVVDDLKKELERIKREVKRLIEENRRTLKDIKRAVDEARK

SEQ ID NO: 25545 - protein, 57 aa, Artificial Sequence
  Synthetic
DEDELVEEIERRLREIEKRLRDVMEESKRRLEEILRELKRIIDESRKRLDDLRRRLK

SEQ ID NO: 25546 - protein, 59 aa, Artificial Sequence
  Synthetic
ERIEKILEEILRLSRESLRKLKKILEELLKVSEDSLRDLIRILEDLLRLLKDLLEKLKK

SEQ ID NO: 25547 - protein, 59 aa, Artificial Sequence
  Synthetic
SEDEELEDLKRKLRRALERYEDRLREIKRRLDEKLKEIKRDYDRLKKELDDLLREIERR

SEQ ID NO: 25548 - protein, 55 aa, Artificial Sequence
  Synthetic
EVVKELLDLVREIIKRLKEIHEEILRLIETVLEDLERANRRLLDLARKILEDARK

SEQ ID NO: 25549 - protein, 60 aa, Artificial Sequence
  Synthetic
SKEEKLEDLIRRIKERLEEALRRNKKTADEIRKELKKATDRNRKRAKELRERLREVLRRT

SEQ ID NO: 25550 - protein, 55 aa, Artificial Sequence
  Synthetic
EVVEELLRLLEELLEHNREVIEKLVDLIRELLRHDKEVTEEILRLIEELLKEVEK

SEQ ID NO: 25551 - protein, 56 aa, Artificial Sequence
  Synthetic
SERELIERWLELHKEILRLIRELVERLLKLHREILDTIKKLIRELLELLEDIARKL

SEQ ID NO: 25552 - protein, 59 aa, Artificial Sequence
  Synthetic
DDERRTLTELLKRMEDILEKVERTLKKLLDDSKRMAEEVKKTLKELLERSEKVAEDVRK

SEQ ID NO: 25553 - protein, 60 aa, Artificial Sequence
  Synthetic
SEDELIRRIREELKRLEKEHEDMVRELEKKHKKLKEELDRAIEEIERRLRELKERVEREG

SEQ ID NO: 25554 - protein, 55 aa, Artificial Sequence
  Synthetic
DELVKEIKRLLEELLRLLERLVRSSRRLNEELLRLSEKLIRDAERLARELLEAAR

SEQ ID NO: 25555 - protein, 56 aa, Artificial Sequence
  Synthetic
KKEEDLRREVEEVKEEIRELIERSRESVRRILKEIKDLIRKSKESIDKILEDLKRK

SEQ ID NO: 25556 - protein, 59 aa, Artificial Sequence
  Synthetic
EEVLRVVEELLKLLKEHLEENVRILRRILELLRRHHDTNRKIVKRILELLRRVLESIRK

SEQ ID NO: 25557 - protein, 60 aa, Artificial Sequence
  Synthetic
SVEEILRELLRVLEEILKRIADINEKLLRVSRKIVEDLKRLLDEALRVLRRAVEEIEKEG

SEQ ID NO: 25558 - protein, 58 aa, Artificial Sequence
  Synthetic
ERLREILEELERVLEKVMRDLRRILREYEEVLKEAREEYRKILEELRKVLKEVDDRLR

SEQ ID NO: 25559 - protein, 57 aa, Artificial Sequence
  Synthetic
SELEKIDRLLEKVLRENKRALDELVRLLEELIKTNRDALEKLREINERNIERLREEV

SEQ ID NO: 25560 - protein, 59 aa, Artificial Sequence
  Synthetic
KKVLEDLERHLEESKKTVERLVRELRKTHRKVEEDVKRLIEELRRLHEELRKRLEDDDR

SEQ ID NO: 25561 - protein, 56 aa, Artificial Sequence
  Synthetic
REKEELIKLIRDILEKLREHSRTIVELLETILRVVREHSKRIEKLLRELLDILRRQ

SEQ ID NO: 25562 - protein, 60 aa, Artificial Sequence
  Synthetic
EKEVEDLLRKAVEDIEKLIRENEKLLEDVLRTIRKLIRENEELLRDIVEKIKRLADEARK

SEQ ID NO: 25563 - protein, 59 aa, Artificial Sequence
  Synthetic
SEEEEVKKVVDEIKKVLDELRKANEDSARRLREVLEELRKRNEESKKEVKDLLEELKRV

SEQ ID NO: 25564 - protein, 60 aa, Artificial Sequence
  Synthetic
TDTKVKELIEIVDELLEIDDRILEEIERTVRKVIDLNRKVLEDIEELVKEAIKVLEEIAK

SEQ ID NO: 25565 - protein, 59 aa, Artificial Sequence
  Synthetic
DEEEELRELKERIERTIEKLKEDTKKLKKELEDRIRELKRKTKELLDDMKRLIKEVKDK

SEQ ID NO: 25566 - protein, 55 aa, Artificial Sequence
  Synthetic
EDIIRLVRDLIRLNREHLRDLEEAVREIIKLLREHLERLERVVDRMIRELRKAAK

SEQ ID NO: 25567 - protein, 57 aa, Artificial Sequence
  Synthetic
SEEEELDKLRRELEELAKESTREVKELLRELREMLERHKKRLKEIKDKLDEDIKRED

SEQ ID NO: 25568 - protein, 58 aa, Artificial Sequence
  Synthetic
DELERLKDLLRTLIKKLEDLLENLRRLVERVIESLRRLVEKDEEINKRTIKELRRAIE

SEQ ID NO: 25569 - protein, 60 aa, Artificial Sequence
  Synthetic
DEERIVDKILKVIRESAEALRKIVEDVLRVLEELMRRHKKNVEELDTIVEDLLRKVRERV

SEQ ID NO: 25570 - protein, 56 aa, Artificial Sequence
  Synthetic
EEVLREARRRIREVERHNKKVHDDARKRLRDLVEELKRLHRELEEKLRRIIEEIDR

SEQ ID NO: 25571 - protein, 61 aa, Artificial Sequence
  Synthetic
SEDEKVRKLLRDLAEEIKRLLETYDRKLKEIAKRIEDTLREYRERLEELKRRLEELVRKKN

SEQ ID NO: 25572 - protein, 59 aa, Artificial Sequence
  Synthetic
EELVREIRRTLETILRLNEELLKRIRDVLREIIELNREVIERLREILERLADLIRRRAE

SEQ ID NO: 25573 - protein, 60 aa, Artificial Sequence
  Synthetic
SELEKLARLLEEILELLRELHRKTAEALKEILELLDRHLDDLRRAVKEILEDLDKDLEDE

SEQ ID NO: 25574 - protein, 56 aa, Artificial Sequence
  Synthetic
DDKAKKVREKLEELLRRLKEKNDDLRRKLERLARELEKLHEEVKKRLKELEDEARR

SEQ ID NO: 25575 - protein, 60 aa, Artificial Sequence
  Synthetic
RELEKLAEVLERIVRALETHLKLIADVLREILRLLDEHLKIIKKVVRDILRELDEVLRRR

SEQ ID NO: 25576 - protein, 56 aa, Artificial Sequence
  Synthetic
SDTLEKLRRRLEDRRRKLKEANDRVREVLDRLRKELEEIDKRLEDVLKKLREDLER

SEQ ID NO: 25577 - protein, 60 aa, Artificial Sequence
  Synthetic
SKKELLEEVVRRAIELLKRHLEKLKRILEEIVRLLEEHLEKVERVLEAILRLLDDLLRRV

SEQ ID NO: 25578 - protein, 56 aa, Artificial Sequence
  Synthetic
KDKLKEIEDELRRLLEELRRLDKKIKDRLRELKKDLDEANRRIKETLKKLLREVEK

SEQ ID NO: 25579 - protein, 56 aa, Artificial Sequence
  Synthetic
SDLEELEKLIRRLLKINEDLIRIIEDLIRKSLTLLKRIVDLIRELIREIEEIIRRT

SEQ ID NO: 25580 - protein, 55 aa, Artificial Sequence
  Synthetic
EEIRKRVRDLEEKVKKLLRDLEEESRRVAEKVEEDLKRVEEESRRTAREVEEKER

SEQ ID NO: 25581 - protein, 60 aa, Artificial Sequence
  Synthetic
SKEERADELLKDLERKVDKLRREHEELLKELKRKVDELRKEHKKLLDTLREEVRRIEEKV

SEQ ID NO: 25582 - protein, 59 aa, Artificial Sequence
  Synthetic
EDVLREITRLLEKAKRIIEESLREITELVKEIEKIIKESLDAARRLLEEIKKILEELAR

SEQ ID NO: 25583 - protein, 59 aa, Artificial Sequence
  Synthetic
SIEELARKLVKENRRLATEANKILKDIVKTNRDSIRKVREILKELVERLRDLIRKVRRD

SEQ ID NO: 25584 - protein, 55 aa, Artificial Sequence
  Synthetic
EDLKRELERAKRELERLLRELDEEHERMKKKVKDEIRRLKKESEEVKKEVKDTED

SEQ ID NO: 25585 - protein, 59 aa, Artificial Sequence
  Synthetic
DEEEITRKLEETIRRLEEEIDKIIKDLLRMLEENNKEIKKVIEKVLETSRRILSALARN

SEQ ID NO: 25586 - protein, 56 aa, Artificial Sequence
  Synthetic
EEVLREAEKRIRDSAEEVKRILEEHKERLRELVKKLERVKETVRKKIEELREEAKR

SEQ ID NO: 25587 - protein, 56 aa, Artificial Sequence
  Synthetic
SELEKDLKDAEEIIKELEEINKRLLEEIRRIVERITKINRDLLETVKRLIEELIKE

SEQ ID NO: 25588 - protein, 56 aa, Artificial Sequence
  Synthetic
EERLKEIEERIRRTEEDVKRKHDDVRRELDEEDDRYKRELDKVRKKLKEKADRIRD

SEQ ID NO: 25589 - protein, 56 aa, Artificial Sequence
  Synthetic
SKLEDLLRKVEEIIKEIERINEELLKRVAEIVETLLRENKKLLEEIKEILKRLIED

SEQ ID NO: 25590 - protein, 56 aa, Artificial Sequence
  Synthetic
ERKLDKIRKDLERVVREYEEKLKEVRKRLRELVERVKEKHKRIEEELRKTAKEVRD

SEQ ID NO: 25591 - protein, 59 aa, Artificial Sequence
  Synthetic
SSKELVEKLKELIKDHLRVADEVIKKLEELIRRHLRKVEEIARRLEELIRELADELRRA

SEQ ID NO: 25592 - protein, 55 aa, Artificial Sequence
  Synthetic
RRLDRLEEKVEKDLRKLARELEDVNRRLEEELRRLEKRSEDLNRRIREEIKKDAK

SEQ ID NO: 25593 - protein, 61 aa, Artificial Sequence
  Synthetic
KDDEILRKLLEILERLLKLSEEVLRELLRLLEELLRLSKESLKRLSRLLEEALKTLVEEEG

SEQ ID NO: 25594 - protein, 59 aa, Artificial Sequence
  Synthetic
ERLKAVVDRIEKAIKKVTEDSRRLVKRIETELRELVKRSKDLAREVEKRLKEVVEEAKR

SEQ ID NO: 25595 - protein, 59 aa, Artificial Sequence
  Synthetic
SDLERILDKVTKLAEDAKKLAKKSVDLHRDNIRRLKTTLKRILESLRKAIKRLKDALRR

SEQ ID NO: 25596 - protein, 55 aa, Artificial Sequence
  Synthetic
EELEELKRDLDRLFEKIRTDLKRLRDTNRKLFDDLRKEHEAVEDKVRRVAEELTK

SEQ ID NO: 25597 - protein, 56 aa, Artificial Sequence
  Synthetic
SEEDLVREVLRAIKRILELLTTLSKENLEVVKRIIEDLERVARENLRVIEEIIKKI

SEQ ID NO: 25598 - protein, 56 aa, Artificial Sequence
  Synthetic
ERIIEEIRRTATEVLKRNEAVVKKIRELIKRVTERNRKVLEEIKELVKRIKDELRR

SEQ ID NO: 25599 - protein, 56 aa, Artificial Sequence
  Synthetic
DKEREIDDIAEKLRRKYKKLREDLDRIEEELRERYERLKRKLDELARRLTKKARDE

SEQ ID NO: 25600 - protein, 55 aa, Artificial Sequence
  Synthetic
ERLEELLKEVVETLRRLLEELKRLSEEVLKKAKEVIDRIRRLSEEVVKSLRDAAK

SEQ ID NO: 25601 - protein, 61 aa, Artificial Sequence
  Synthetic
SEEEELDKLLKEYERVVREIEEKLDRVKRDIERLVEEITRDLRRVLEEYRKVVEELAKDEG

SEQ ID NO: 25602 - protein, 58 aa, Artificial Sequence
  Synthetic
DTARRIERLSREVIKKLEKALKELEDLVREVLRRLKEAVEEIHKLSRDVIKMLTDATR

SEQ ID NO: 25603 - protein, 59 aa, Artificial Sequence
  Synthetic
DDEERLKKVKEEIEEKAKRLKEDLERALKRYEDIIKKLEDDNRKVLERIRRKVEELKKN

SEQ ID NO: 25604 - protein, 60 aa, Artificial Sequence
  Synthetic
DELIRKALEELLRIAEEILRRDLRLLEENRRVVKESLDVLAELLERLLELLERILREVRK

SEQ ID NO: 25605 - protein, 60 aa, Artificial Sequence
  Synthetic
SERDVLRELLERIKKLLETLIRIVEELVRRSEETIKRLAELNRRLIEEIRRIVEEVKKDV

SEQ ID NO: 25606 - protein, 55 aa, Artificial Sequence
  Synthetic
EEVKKRVEELRREYRETLKRLRDESEKIAEELKRLLDELRRRLEELARELRERTK

SEQ ID NO: 25607 - protein, 58 aa, Artificial Sequence
  Synthetic
TEEEIIKEIVKLLRDLARLHEEVDRTNKRLLDELVRLHREVDERLTRLAEDLIRLAEK

SEQ ID NO: 25608 - protein, 56 aa, Artificial Sequence
  Synthetic
RKDLRKVVEELRRRIEELNRRHDKLAEDLRREIEELNKEHKRMLRELEKKIEDDRR

SEQ ID NO: 25609 - protein, 57 aa, Artificial Sequence
  Synthetic
DAEEILKEIHEIDKRTIDEIRKILKKLLEADKKSIDDIRRILKKLLEIVKRLIDLLR

SEQ ID NO: 25610 - protein, 56 aa, Artificial Sequence
  Synthetic
DKTLKKILDELRRKVKETDDRLRKLHEDLKRKVKELIDRLERLNEDIARLLKETRD

SEQ ID NO: 25611 - protein, 57 aa, Artificial Sequence
  Synthetic
KTEELLRELIKVLKETLDRLKRVLEKLAETNDKSLKELLKLLEELLKAIRDVLRRIL

SEQ ID NO: 25612 - protein, 55 aa, Artificial Sequence
  Synthetic
DEVVEELEKVARELADKLRRVLKESEDVVKRVKDELREVLDRSKKVLEELKKKRK

SEQ ID NO: 25613 - protein, 58 aa, Artificial Sequence
  Synthetic
SKEELVKEIDELNKRVNDLLEELLRKSEKLHKEILELLERLLREIIKLLRRILEIVER

SEQ ID NO: 25614 - protein, 56 aa, Artificial Sequence
  Synthetic
EDELRRLLEDIERKIERLLRELKKESEEIRKRIRELLEDNRDKSRKIKKAIEELKK

SEQ ID NO: 25615 - protein, 56 aa, Artificial Sequence
  Synthetic
KLEDAARIAAKAAEEWAEAHKRAAKINAEASEEWAKAHREAAKIAAEAAKRAADEA

SEQ ID NO: 25616 - protein, 55 aa, Artificial Sequence
  Synthetic
EDALRVIEKAAEDAERAAKESLDVAERALRESEKAAKESLEVLERALRDAKRAAD

SEQ ID NO: 25617 - protein, 55 aa, Artificial Sequence
  Synthetic
SALETAAKLAKEAADRWLEASKRAAELAKDAADKWLDASRRAAELAKKAAKEALD

SEQ ID NO: 25618 - protein, 60 aa, Artificial Sequence
  Synthetic
DTDLKRRAAKAAEDIKKAADELLKKSEDAAREIKEAADKLLEDSKRAAEEIKRAADEITR

SEQ ID NO: 25619 - protein, 57 aa, Artificial Sequence
  Synthetic
DEAEKLAKEAREAIKRYADASEKIAKEAREAIKKYLEASKRIAKELREALKELARRL

SEQ ID NO: 25620 - protein, 56 aa, Artificial Sequence
  Synthetic
KDAVREADEAAERAREKLERLSREAKKAAKDAKDKLKRLSDEAKKVARRLIEELKR

SEQ ID NO: 25621 - protein, 58 aa, Artificial Sequence
  Synthetic
SKDEKAIEALKRAADETRKAAEKSADAARRAAEKSEKAAREAAEALKRAVEEAARALG

SEQ ID NO: 25622 - protein, 55 aa, Artificial Sequence
  Synthetic
EAVLRAAEKAIKAAEEAARANKKAADEAIRANEEAAEANKRAADKAIKAIRDAAR

SEQ ID NO: 25623 - protein, 58 aa, Artificial Sequence
  Synthetic
DREDAARRVEKAAREIAEKNKKAARDIKELAKEAIKRTKEAAERVKRAAKRIAEAAEE

SEQ ID NO: 25624 - protein, 56 aa, Artificial Sequence
  Synthetic
KDAVKRALEELARAAEEAARADAEAAKKLAEAAERAARANIKALRDLAKAAKDAAR

SEQ ID NO: 25625 - protein, 60 aa, Artificial Sequence
  Synthetic
REEEAAREAAEAARRAAEIAIKANEEAARAAKRAAEISIKASEDAARAAEEAAKEAARSN

SEQ ID NO: 25626 - protein, 59 aa, Artificial Sequence
  Synthetic
EDALRRAKKAIEDAIKVLKEALDKSAKAIEEAIRVAKEANERSAKAIKDAIEVAERAAR

SEQ ID NO: 25627 - protein, 59 aa, Artificial Sequence
  Synthetic
SEAETLVERLKRLSERDERAARRLVEELKRLAEEDKRAAEELARRLEELARRAEDVARA

SEQ ID NO: 25628 - protein, 116 aa, Artificial Sequence
  Synthetic
EEAARAIKLAREAAKRAIDASKESADAAERAAKEAIKASKRSAELAEEAAREAIKALKDAAEEAAKRLRRAAEEALKINKRANEELERAAREALDLNRRANEDLEKAAEDALRTAK

SEQ ID NO: 25629 - protein, 59 aa, Artificial Sequence
  Synthetic
REAEELVKRLKELAEKDRRAAKRLVEEAEKIIRRARELSKKTVKKLEDLIERAKRLADA

SEQ ID NO: 25630 - protein, 56 aa, Artificial Sequence
  Synthetic
AEDAARRAEEAARRALKINEDAAREAERAAREALKINDEANKRLEEAARRALETAR

SEQ ID NO: 25631 - protein, 60 aa, Artificial Sequence
  Synthetic
KELEEILKTVEDLVRRAKELLRRIHEINRESIEDIRRLLKEIHDTNKRSIEKVDELLKRK

SEQ ID NO: 25632 - protein, 56 aa, Artificial Sequence
  Synthetic
ETEIRKILKESNDRLTEVIKEVEKVLRESDELLRDALKKIVDVLREVLKRLEDTVR

SEQ ID NO: 25633 - protein, 59 aa, Artificial Sequence
  Synthetic
EKEKEIKDAEDEARKAAEESKRKIDKADEDAKKALEELERSIREADKDAKRALDEERRE

SEQ ID NO: 25634 - protein, 57 aa, Artificial Sequence
  Synthetic
REDAARIAAKAAKDALKANEEAARILARAAKEALKILEDATRILKEAADRALDILRK

SEQ ID NO: 25635 - protein, 60 aa, Artificial Sequence
  Synthetic
SEVEEIEKVARRNLELIKRLLEKAERVAKKSLDLIKKAADDARRIAEETLKLIREAAEAG

SEQ ID NO: 25636 - protein, 62 aa, Artificial Sequence
  Synthetic
KEAEDLLREAAKRAEELIRRAEEAAKRLKEEWERLIRELKRALEEYAKEAKKLIKELEDRTR

SEQ ID NO: 25637 - protein, 62 aa, Artificial Sequence
  Synthetic
SKREEAEKAARRAEKLAREAREAARRSLERAKDLARRHEKLSRELLEEAKRLAEEVKETAKK

SEQ ID NO: 25638 - protein, 56 aa, Artificial Sequence
  Synthetic
IDEALKALKRAADLSADANRRALEALEKAARLSARAAEEALEALRRAAELARRAAE

SEQ ID NO: 25639 - protein, 57 aa, Artificial Sequence
  Synthetic
SAEDIIRESEKADKDALDEWRRLIKKLEDLIEELLKENERLIRKLEELIKKALEADK

SEQ ID NO: 25640 - protein, 56 aa, Artificial Sequence
  Synthetic
GEEAAERAKRAADEAKKASDEAAKEAREAAERALRAAEEAAKEAEKANRDALRSAK

SEQ ID NO: 25641 - protein, 61 aa, Artificial Sequence
  Synthetic
SEDEELAKEAKRAVEEAKKRLEDLLRRAEEAHRRAKKELDELARRAEEAHKKAKRDIDRDA

SEQ ID NO: 25642 - protein, 62 aa, Artificial Sequence
  Synthetic
EEIVRRADELAKRAEELNRRLAEEADKIAKKAKDLNERLLREARDIARRAKELIKRLLDARR

SEQ ID NO: 25643 - protein, 56 aa, Artificial Sequence
  Synthetic
SKAERVVDEARKTDEEVLREAEKVNRKVEEVIRRVLKRNEDVNREIARAIERVLRG

SEQ ID NO: 25644 - protein, 59 aa, Artificial Sequence
  Synthetic
EEVLRTAEEVVREALRLVTDAHRVNEEVIRDVLRLVERVHRVYEEVNRRNDELLKELTD

SEQ ID NO: 25645 - protein, 58 aa, Artificial Sequence
  Synthetic
KDEERLREILKKYKEDSERILREVREILERYRRAIEEILKRLEDILRKLEEDVRRELK

SEQ ID NO: 25646 - protein, 55 aa, Artificial Sequence
  Synthetic
TKALKTVRDVLELLRKILEEVRRLNEKLLEELKRLLDEVVEKNERLIKLLEKDAE

SEQ ID NO: 25647 - protein, 57 aa, Artificial Sequence
  Synthetic
DELETLEDVLRKIEDLLRRWLEKLEETLKRIIRLLETSLKLLEESIRRILRILERDV

SEQ ID NO: 25648 - protein, 58 aa, Artificial Sequence
  Synthetic
KKVRDVLREIEELLERHKRLLEKLARELRELAKRHREEIKKVLETLKKLAEELTRRVR

SEQ ID NO: 25649 - protein, 60 aa, Artificial Sequence
  Synthetic
SEKEELRRELEEHAKRSRDTVKRLEDENRRVLESLKRKVDTLRRINEETLREIRRLAREE

SEQ ID NO: 25650 - protein, 55 aa, Artificial Sequence
  Synthetic
EKLKRDLEDLKRKHDELRKRLKEELDELRRKHEKIKEELDRHLKELEDKLREARR

SEQ ID NO: 25651 - protein, 60 aa, Artificial Sequence
  Synthetic
SEKEKLTEILRRHERESERVVKELDEENKRHLKKSREIADTLRKLNEETLERIRELVKRA

SEQ ID NO: 25652 - protein, 55 aa, Artificial Sequence
  Synthetic
ETLKRELERLKEEHERLKEELDRHLKALEEKHREIRREIDEHLKELKRRLDEERR

SEQ ID NO: 25653 - protein, 60 aa, Artificial Sequence
  Synthetic
SEKEKLIEDLRRILKETEERLKRVKERLRELLDEYRRRSEDKLRELKKELEEEEEKIRRS

SEQ ID NO: 25654 - protein, 62 aa, Artificial Sequence
  Synthetic
DRLRKRIKETADRLREMLKRHRELLERSMELLRRALEEAKKVLDETEETARRLLKLAEDEER

SEQ ID NO: 25655 - protein, 60 aa, Artificial Sequence
  Synthetic
KEIEETLKELEDLNREMVETNRRVLEETRRLNKETVDRVKATLDELRKMLKKLVDDVRKE

SEQ ID NO: 25656 - protein, 55 aa, Artificial Sequence
  Synthetic
KKVEELEKALEEIKRRLKEVIDRYEDELRKLRKEYKEKIDKYERKLEEIERRERT

SEQ ID NO: 25657 - protein, 57 aa, Artificial Sequence
  Synthetic
SEEEDREREYEERHKKAEEDLRRAEEEYARELRREEERLKEEAKRLEKELRDARTKL

SEQ ID NO: 25658 - protein, 59 aa, Artificial Sequence
  Synthetic
EKAKKALDEAVKRVKEDIKRLEDSVKTADDKDRKAIRRAEETVRTHIRTNEEAVRREEK

SEQ ID NO: 25659 - protein, 56 aa, Artificial Sequence
  Synthetic
SELEETLKRLKETNKRLLKKVKELVDESLRLNEELLRRLREVIRKIKETIKEVLEE

SEQ ID NO: 25660 - protein, 55 aa, Artificial Sequence
  Synthetic
ERVDELRKRIRKTEEEIEDIKRRYEKRVRELKETLDRIVKELRDRYKKIREEIDT

SEQ ID NO: 25661 - protein, 59 aa, Artificial Sequence
  Synthetic
DIEDVLKKVLEKNLRVLREVHEVNKRVLDEIVKLLRELHRVNKRVLEIILRLLEALRRG

SEQ ID NO: 25662 - protein, 56 aa, Artificial Sequence
  Synthetic
DEDLKRIEDELRRTLEEHRKRLREVERELEKKVEEHERELRKYEEETKRLLREAER

SEQ ID NO: 25663 - protein, 61 aa, Artificial Sequence
  Synthetic
REEERLRELITDYKRKLDDLKRRSEDLLREYEKTLEDIRRESERTKKELRESLKRDLDREG

SEQ ID NO: 25664 - protein, 55 aa, Artificial Sequence
  Synthetic
EKVKRELEKHTKLLKEILDTVRDLNRKHSEEIRRTVEEVRKANRRLLEELKETRK

SEQ ID NO: 25665 - protein, 60 aa, Artificial Sequence
  Synthetic
SELEETLKKIKELAEISRKLADETRREIKKLIDDSRKLLEDTHRTNEEMVRRVETKAKDK

SEQ ID NO: 25666 - protein, 59 aa, Artificial Sequence
  Synthetic
EEKLREVRELLERYREDVRRLKKEYEELLREEDKKVKKKKEDYERILRKTKKELDERRK

SEQ ID NO: 25667 - protein, 59 aa, Artificial Sequence
  Synthetic
SEDEKAAEDLKKLAEESIRELEKALRDAARLHEEALKRLKKALDEAARLAERAIEEARK

SEQ ID NO: 25668 - protein, 55 aa, Artificial Sequence
  Synthetic
EELIKLIEDLLRLAAELAKKIAELAERHLRLLEEAARKHIELVERLIELAKRDTD

SEQ ID NO: 25669 - protein, 60 aa, Artificial Sequence
  Synthetic
SEDEELEKLLEEAKKLIEESSRRLDELLEEDRRVVKRIEEEVEKLLKEVKEEIDKIKKEV

SEQ ID NO: 25670 - protein, 54 aa, Artificial Sequence
  Synthetic
KVLEIVKEIIDRIRKLLKKTFDISDELLRKWEDLLRRNNDLSRRLLKEAEDKAR

SEQ ID NO: 25671 - protein, 60 aa, Artificial Sequence
  Synthetic
SEKEDLARKLRKLVEELTREYEELVKKLERLIEEIEKVSEESVRKLEKLLREISEEVRKL

SEQ ID NO: 25672 - protein, 59 aa, Artificial Sequence
  Synthetic
DELLRKLVELLVEVLRRLIRVNRELVKLLREVLERLLRILRESVKKLKRLIEKVIKDET

SEQ ID NO: 25673 - protein, 57 aa, Artificial Sequence
  Synthetic
KEEEDLLERVKRVLDELIEIVDRNHELNRRVVETSARLVERLLEEVERALETLEREI

SEQ ID NO: 25674 - protein, 59 aa, Artificial Sequence
  Synthetic
SRLVKKLDEIVKEVAKKLEDVVRRNEELWRKLVELNKESVRRLREIVERVARDLEETAR

SEQ ID NO: 25675 - protein, 59 aa, Artificial Sequence
  Synthetic
RRTEEVIKKIAKLIDELIETLKKIVEDSAKLIKELIDLLEEIIKRSADLIRELEKVSKR

SEQ ID NO: 25676 - protein, 56 aa, Artificial Sequence
  Synthetic
ERRIAERIRELLRESKKLVRDVVEEAKRLLKENRDSTRKIIEDIRRLLRKIEDSTR

SEQ ID NO: 25677 - protein, 59 aa, Artificial Sequence
  Synthetic
DKEDIIRRLARVLERHDEANREVVKEHDEVLEEHLDVHRRVVRSNIEVLRTLLELVEKL

SEQ ID NO: 25678 - protein, 56 aa, Artificial Sequence
  Synthetic
EKDIRKVIEDIERLHRESMEEVRKLVEEIKRLNKEVLKRSEELVEEAKRLLKEVAD

SEQ ID NO: 25679 - protein, 59 aa, Artificial Sequence
  Synthetic
DTKEVIEKLIRVLERAVKLLRELVDRDNRSLKKAVDLHREVVRKIIEVLEEAVRLLATV

SEQ ID NO: 25680 - protein, 60 aa, Artificial Sequence
  Synthetic
EEKLLREVERLVRELAKRLRESLKTVEDLVRELADTNRRSVKTVEDIVRDLERKAREVTR

SEQ ID NO: 25681 - protein, 60 aa, Artificial Sequence
  Synthetic
SKRELLERVIREAERVLKEWEDLLRELTETSDRVIRDVERLLRELLRKAEEVIKDILRKS

SEQ ID NO: 25682 - protein, 59 aa, Artificial Sequence
  Synthetic
EDLKRVLERLTRVAEEILELLEEVLKKSNRSLEKAVEANAEALDRLIEVLRELLDDLRK

SEQ ID NO: 25683 - protein, 60 aa, Artificial Sequence
  Synthetic
SKEELLKKVEDEARKVLEEWKEEVKRLIEESKRVLDDWRRLVDEVSKDIKRVIDEARKDS

SEQ ID NO: 25684 - protein, 59 aa, Artificial Sequence
  Synthetic
EDLKRVLEKLIKVIEKIVRLNEEALRKSNESLERIVKLNEEALRELIRVIERLVELVRK

SEQ ID NO: 25685 - protein, 55 aa, Artificial Sequence
  Synthetic
KEREEIDELVKELEKELRRLVRENEKLVEDNERTLKRLLEENKRLVEELVKRLRD

SEQ ID NO: 25686 - protein, 57 aa, Artificial Sequence
  Synthetic
KDEVVEIVIRVLEEILRLSEEALRIHIRVTREVLRLSKELIDEIRKVLREIADRIRK

SEQ ID NO: 25687 - protein, 59 aa, Artificial Sequence
  Synthetic
SKEELLKELLDRVRRVLTEIKKLLERLLRRSKEVIDDSERLVREVLKRVEDLAREIKAE

SEQ ID NO: 25688 - protein, 59 aa, Artificial Sequence
  Synthetic
KDALDKLRRLIDELARLLREVHERDKELIRDHLREVEEIAKEIARLIKRLAEEIREITT

SEQ ID NO: 25689 - protein, 60 aa, Artificial Sequence
  Synthetic
SERELAKRALERAKEAAEESKRLAKELLDRSRELAKRSKELADEVLKRAKKAAEEIKKKR

SEQ ID NO: 25690 - protein, 59 aa, Artificial Sequence
  Synthetic
KDAAREARKLLKDLLELAERAHKKDRDAIEEHLRLAEEASKRDKELLKELLDLIREIAR

SEQ ID NO: 25691 - protein, 56 aa, Artificial Sequence
  Synthetic
SKEEEVEKVLRKWEEILRRLIEENKRANDKIRREYEELVKEIRRVLEEIKEVAERL

SEQ ID NO: 25692 - protein, 56 aa, Artificial Sequence
  Synthetic
KDVVRKLIEVIERLLRVAEEVIRRILKVNTELMRVDERSIRESLKAIREVLKVLDT

SEQ ID NO: 25693 - protein, 60 aa, Artificial Sequence
  Synthetic
SKEELVDTVKKKLEEVLKKIDKLSRDVKEKLRRVIEELRKLSREVHETNREVARRLREEA

SEQ ID NO: 25694 - protein, 60 aa, Artificial Sequence
  Synthetic
EETVLRTLEKIIRDHNKAHKRVTDAVAKILEELIKLHDEVSRRLKDILRRLLELLDEVTR

SEQ ID NO: 25695 - protein, 60 aa, Artificial Sequence
  Synthetic
RKEELVDTVKKDLERVIETVRKLSEDVKEKIRRVLEDIDRLSKEVHETNKRVVEELEDKK

SEQ ID NO: 25696 - protein, 60 aa, Artificial Sequence
  Synthetic
EETVLRELVKLIRDHNRMHEEVVRRLKKIIEEALKLHDEVSRRVAELLREVIELLDRVAK

SEQ ID NO: 25697 - protein, 60 aa, Artificial Sequence
  Synthetic
DKEREVDEILRRVTKLLKELEKRSKEILDRVRELVREYKRKVEEILKRVEDLIRRLIKDK

SEQ ID NO: 25698 - protein, 55 aa, Artificial Sequence
  Synthetic
DELRKILKELEELLRTLNKELKEVVKELRELLKELHDRLREILEELKRLLEEIAR

SEQ ID NO: 25699 - protein, 60 aa, Artificial Sequence
  Synthetic
DEDELIRKLLEDLKDIVRKILELIERDLRDIERVVRRIVKVIRDDLKKIKEVVDDIRRRV

SEQ ID NO: 25700 - protein, 59 aa, Artificial Sequence
  Synthetic
SELADRIRKLIEDLERHTKKVLEDVKRAITELRKNSKDILEEVRKLIDELRKRIKEVED

SEQ ID NO: 25701 - protein, 56 aa, Artificial Sequence
  Synthetic
KAEEIAKIAVDAVRKIAELLRRASKINLDAIRKAAKLSKEASKINLDAIRKIAEEV

SEQ ID NO: 25702 - protein, 56 aa, Artificial Sequence
  Synthetic
RKALEKARKLAEDALRANKRANDEAKKLADEALKENRKALEDAKRLARKAAEDAKR

SEQ ID NO: 25703 - protein, 59 aa, Artificial Sequence
  Synthetic
SEEELLRRIRELLKKALEDNKDVLREIEELLRKVTEDNDRVLEEIRKLLEEVDEVVKRA

SEQ ID NO: 25704 - protein, 59 aa, Artificial Sequence
  Synthetic
DELRRVVEKIEKVLRDVVRALRELVRINARVLEEILRLIEELVRRNAEVLKRILELVAT

SEQ ID NO: 25705 - protein, 61 aa, Artificial Sequence
  Synthetic
SKEDELRKAEEDARRVVEEILDLNRESVEKSRRVAERVLRLNEDSVRKSRDVVRRIKEEVN

SEQ ID NO: 25706 - protein, 54 aa, Artificial Sequence
  Synthetic
VVRKLIEANEDHLRVNKEIVDRLIKANEEHLEVNRRAVEKLIEVLKRLLDVARK

SEQ ID NO: 25707 - protein, 60 aa, Artificial Sequence
  Synthetic
SEKEDLVRTIEEVVKTIEELVERHERKIDEIVKRSRELVRTHVEKIEEIVRRVEELVRRG

SEQ ID NO: 25708 - protein, 57 aa, Artificial Sequence
  Synthetic
LDTLAEEVKRVLKEHVDLVRKAARLDSETLKKHVDLVRTAAERVSEVMKELVELVRR

SEQ ID NO: 25709 - protein, 60 aa, Artificial Sequence
  Synthetic
SEIEELVKDIERIVREIKKLIDDHVRKLEKIIEDIERDMRRHEETVREVVRKIEDEVRRG

SEQ ID NO: 25710 - protein, 57 aa, Artificial Sequence
  Synthetic
LDSLAKKVSDVARKHLDLARRVIKLISEALKKHIRLVEKAMEDISRILEDLVRLVRK

SEQ ID NO: 25711 - protein, 60 aa, Artificial Sequence
  Synthetic
SKLEDAVRRIEEILRHIVRSLEEVVKDIEKILRDHVRMLREVVKRIEDVLRRVVELLRRA

SEQ ID NO: 25712 - protein, 56 aa, Artificial Sequence
  Synthetic
KDVLREVAERIRKVIERLKELLDRSRERAEDVIKKLRDLLKENERLIEEVRRRLEK

SEQ ID NO: 25713 - protein, 57 aa, Artificial Sequence
  Synthetic
SREEAVADVIRRLEEILEKNLRLLEEIIRRLLRILEHNLRLNEKAVEIIEDLIRKLL

SEQ ID NO: 25714 - protein, 56 aa, Artificial Sequence
  Synthetic
SRLADDLRRVVKKIVEDLEENLERIKDIIRRLVEELERSLEEIRRLIDRLVKEIRR

SEQ ID NO: 25715 - protein, 58 aa, Artificial Sequence
  Synthetic
SEEEAAREAERLLEEAARVAERIVRDSERLLDEAAEVARKAVEDSKKLLEDALRAARE

SEQ ID NO: 25716 - protein, 56 aa, Artificial Sequence
  Synthetic
REAAERVARRAERANEEALKEAEEVIKRAKEANKRALEEAKRVIDRADKALKEARK

SEQ ID NO: 25717 - protein, 59 aa, Artificial Sequence
  Synthetic
RDRDVLRKVKREIEELVRRIEKVSRDALKEVKRLLDENRKIAEDVLRLIERLLRKIRDT

SEQ ID NO: 25718 - protein, 59 aa, Artificial Sequence
  Synthetic
EEVVEELLRMLKRVAEEMKRVHDDLSRAVEKVVRDVVRVDKELLDELRRILRRLEEVIT

SEQ ID NO: 25719 - protein, 56 aa, Artificial Sequence
  Synthetic
SKDEELMRLLEELVERWRKIVEDLERDHRRLVKEIRELVERIRKKLEELVDRIRKN

SEQ ID NO: 25720 - protein, 58 aa, Artificial Sequence
  Synthetic
EEIRRILEELKRIVDDVLRIIARILKLLRDLTRRLAEVAKKVHKLLEELLRKLKEDTR

SEQ ID NO: 25721 - protein, 56 aa, Artificial Sequence
  Synthetic
KDAETLEKVLRDVLERADEIIKRLEDIYREIKKRLEAIIKEAEDINRKILEEIRRL

SEQ ID NO: 25722 - protein, 56 aa, Artificial Sequence
  Synthetic
VKRALEELKDLIDRNLKVLKDLLDATRKLIEENIRVLREILKRIKDIARELLEATK

SEQ ID NO: 25723 - protein, 61 aa, Artificial Sequence
  Synthetic
SSKEEVLELIKELVRSSKEVLERVVRLNEKSLRISVEVLDRIVELIEEIVRIVVRELEKKV

SEQ ID NO: 25724 - protein, 55 aa, Artificial Sequence
  Synthetic
RELLKEIKRIIEEIDRLVKESLKRHKDINDEIRELAKRTLDEIKEVIDRIRERLR

SEQ ID NO: 25725 - protein, 60 aa, Artificial Sequence
  Synthetic
SEEEDVIRDVKRRLEEILKTNADVIRDIEEILKEVKERNKRVVEELKDILRKVLEELRKK

SEQ ID NO: 25726 - protein, 55 aa, Artificial Sequence
  Synthetic
KEVVDLIREIVERLARAVEESLKLLKEIIDLLTESSKELVKLLEEILRTLKEAAR

SEQ ID NO: 25727 - protein, 56 aa, Artificial Sequence
  Synthetic
SDEERLEKVVKDVIEKVRRILEKWKKDIDKVVKELRRILEEWEKIIREVLDKVRRL

SEQ ID NO: 25728 - protein, 56 aa, Artificial Sequence
  Synthetic
ERLLKRVVDILKRLLELNATTIERLLRILEELLKLNKELAERVIRVLEKLLEEIKR

SEQ ID NO: 25729 - protein, 60 aa, Artificial Sequence
  Synthetic
KDMERVLTEHKKAVKELIELLERLLEEHERASRELIKLLRELLERHKRATDELIKLLREN

SEQ ID NO: 25730 - protein, 56 aa, Artificial Sequence
  Synthetic
VEEVVKRLEDVNRTLEEIIRKVEEEAKRVNEDLRKRIEDVVRTLEEVNKRLKEITK

SEQ ID NO: 25731 - protein, 56 aa, Artificial Sequence
  Synthetic
SELEEVAELLKRSKELIDEVEERIRRLATESLRFLDEVVRRIRELLTRLLKEVRDS

SEQ ID NO: 25732 - protein, 55 aa, Artificial Sequence
  Synthetic
ERLLKKTEDVVREILRLIEEVLRTHAEIIREILELIERLLELHKTLVDRLLERIE

SEQ ID NO: 25733 - protein, 56 aa, Artificial Sequence
  Synthetic
SVLETVKRLAEESSERIRKIVEDDKRVADDSSRKIKELIEEIKRRVKELLDRIKDL

SEQ ID NO: 25734 - protein, 56 aa, Artificial Sequence
  Synthetic
KEVVIRLIEELVKLLEDVLRRLLEVNETLVELNKRVWDRLVRINEELAEVALRVAT

SEQ ID NO: 25735 - protein, 56 aa, Artificial Sequence
  Synthetic
SVLETVKKLLEDSSEKIERIVEEDERVAKESSDRIRRLVEEDKRVADEILDLIEKI

SEQ ID NO: 25736 - protein, 56 aa, Artificial Sequence
  Synthetic
KDAVIKVIEKLIRANKRVWDALLKINEDLVRVNKTVWKELLRVNEKLARDLERVVK

SEQ ID NO: 25737 - protein, 59 aa, Artificial Sequence
  Synthetic
SIRELLKELEDVVREIIRDIRRLLEESRRVVERIERETKRLLDEIRDVARRIEETIRRL

SEQ ID NO: 25738 - protein, 59 aa, Artificial Sequence
  Synthetic
KEAVDELRRLLEELKKIVEDILRTLEKLNRELLEIDKRVADRLRELLRTLKKLIEEAAT

SEQ ID NO: 25739 - protein, 57 aa, Artificial Sequence
  Synthetic
SKEEAIKELLKKHKRITEDIIRMARELDREHEEITREIAERLRRLLKKLLDDVRREV

SEQ ID NO: 25740 - protein, 55 aa, Artificial Sequence
  Synthetic
ERAKRVLDKILDDVRRLVEEAAKLLDESVKKSTDIVRRVRKLLDDSLKEVAELAK

SEQ ID NO: 25741 - protein, 57 aa, Artificial Sequence
  Synthetic
KKEDDVRRLLKEHEDITREIIKLIRDLARKHLELNKRVIRALEKVLKDLEDEVRKDV

SEQ ID NO: 25742 - protein, 55 aa, Artificial Sequence
  Synthetic
ERVRRVLDRVVERVAELVREWKELLKRSLDEVREVVKRARDMLRRSVKTVKELVD

SEQ ID NO: 25743 - protein, 58 aa, Artificial Sequence
  Synthetic
DEVEDARKKLEDLERENRKVIKEIEDALRELVKDHDRVVEELRRRLRRLLEELKKLVD

SEQ ID NO: 25744 - protein, 60 aa, Artificial Sequence
  Synthetic
DEEMLKRVVDVLEDLVRTIEKVLRELSETLRELVRRLLELLRENNESVRRLIRILEEALR

SEQ ID NO: 25745 - protein, 60 aa, Artificial Sequence
  Synthetic
SEDEAAERLLREAKKILKRLEDAARESLKSAERILEELEKAARDSLRKAEKIIRDAKRKG

SEQ ID NO: 25746 - protein, 55 aa, Artificial Sequence
  Synthetic
KEAEKLATKLVEDSERAAREAKKLADENVKRSKEAAEEAKRLADRLVKEAEDDAR

SEQ ID NO: 25747 - protein, 59 aa, Artificial Sequence
  Synthetic
SEDEELLKRLDELLKEILKVIEELIRRLEKAHKENMDKIRDSARRLRELLRKLAEDERE

SEQ ID NO: 25748 - protein, 56 aa, Artificial Sequence
  Synthetic
EELVKEILERVDRLLRKSLERLREVLEESRRRLEEVLRALEEVIKRVRDLLRKLRE

SEQ ID NO: 25749 - protein, 57 aa, Artificial Sequence
  Synthetic
RKKEELARVLEESLEVNRKLVRDLAEVLRKDLEIIRELVKRLVEILKKILKVLADVI

SEQ ID NO: 25750 - protein, 59 aa, Artificial Sequence
  Synthetic
EETLRKVVEDLERLLREARRVVKEAVEKSRRSLEDLRRIIEEAIRRNEKILRKLKEIVK

SEQ ID NO: 25751 - protein, 59 aa, Artificial Sequence
  Synthetic
KEDELLRRIKEVIDKTLEDMKRLLKKHKELLDEILRLLAELVEENKKLIDEILKLVEDS

SEQ ID NO: 25752 - protein, 59 aa, Artificial Sequence
  Synthetic
EEAKELVRRLKRAVEESKKKLDELVKDVKRLADDSARDLRELVKRIAELVKKIRDELRD

SEQ ID NO: 25753 - protein, 63 aa, Artificial Sequence
  Synthetic
DAEEALKRAREVLKEAADLNRKAVEDARKILKDAADDNKRALEEAERVLRKALEDAKDARARN

SEQ ID NO: 25754 - protein, 56 aa, Artificial Sequence
  Synthetic
AEKAAEDAKRLLEEAEEASKKLIKAAEELLRELAKASKRALDEARKLIEEAEKAAR

SEQ ID NO: 25755 - protein, 61 aa, Artificial Sequence
  Synthetic
SEREDLLRLIEEVIRELIKLLETNLRLNEETIRTLIRLIKKDLDLNRRSVEELVKLLKERV

SEQ ID NO: 25756 - protein, 59 aa, Artificial Sequence
  Synthetic
SEAADEVRKKLAEDERLNDKSLEELKRILDKDREINRRVAEKLTRILETLRKIIEDVAR

SEQ ID NO: 25757 - protein, 58 aa, Artificial Sequence
  Synthetic
DDLERVLDELRRIIEEIKRRIDKILEDYERVLRDAKRLIDDVLREYRRIIEELKDLLD

SEQ ID NO: 25758 - protein, 59 aa, Artificial Sequence
  Synthetic
KDVLERIKRLLDELRRANEEVVRRVKKILDESLKENRDVVRELKKILDELLEIVAEAAR

SEQ ID NO: 25759 - protein, 57 aa, Artificial Sequence
  Synthetic
SKKERLKKLIKEHLDLLRRLLKELEDLIRKHLELLRRLLRRLKELLRELLKLIEELV

SEQ ID NO: 25760 - protein, 54 aa, Artificial Sequence
  Synthetic
RVEKEVRRALEKVERLIREIKRLVERSLEEVEKLIREIKKRVRDSLRKVKKESE

SEQ ID NO: 25761 - protein, 60 aa, Artificial Sequence
  Synthetic
DEIETVLKRLAELIKESLDLLRETLDELRKIIEESKKSLEDVLRRLKELIDRLRRLAEEK

SEQ ID NO: 25762 - protein, 60 aa, Artificial Sequence
  Synthetic
KDELLRRVEEILKRLLELIRRIIEEHRKILERLLETHEDLIRKHEEILRRLLKAADEERQ

SEQ ID NO: 25763 - protein, 60 aa, Artificial Sequence
  Synthetic
SEKEDVLRRVEEIARRVRDILRRNLEKVERIAEELKKINDDLLKEIERIIKELKEVLRDV

SEQ ID NO: 25764 - protein, 56 aa, Artificial Sequence
  Synthetic
IEEVLEILDRILKTARDVSKENLESLKRALELDRRTNERLEDLLREILELLRKDIQ

SEQ ID NO: 25765 - protein, 60 aa, Artificial Sequence
  Synthetic
SELEELRKLAEEAIEAAKRALDRLHKLSRELIEAAKEILKRLKKLSEDLIRAAEEAARRS

SEQ ID NO: 25766 - protein, 58 aa, Artificial Sequence
  Synthetic
EDAKRAKEIAKEAIERSKKIADEAREIAKRAIDKSKKIAEEAKKIADEVLKRAEDIAR

SEQ ID NO: 25767 - protein, 61 aa, Artificial Sequence
  Synthetic
RESEELIRLLRKIIELLEELVERIRDLLRKHLKLLEEVVELLKRNLDEILRLLEEVLREAN

SEQ ID NO: 25768 - protein, 58 aa, Artificial Sequence
  Synthetic
EKAKKLEELLRDLLRTVREIVKEVRELLEESLRTAEKLVEDIKRELDELRKRLKELVD

SEQ ID NO: 25769 - protein, 58 aa, Artificial Sequence
  Synthetic
DEERLVEEIIRTIKRVIELNEESLREIERVLEEVIKMDKRSLEEIKRVLDEILKLARD

SEQ ID NO: 25770 - protein, 60 aa, Artificial Sequence
  Synthetic
GEELERVLRELKKVLEELIKDNERVNDELRRVLEKLKERNRKVLEDIKRVLEELRDEVER

SEQ ID NO: 25771 - protein, 58 aa, Artificial Sequence
  Synthetic
SSEEIIRTLEKAIRESEEKLERLVRRDEEVVKDLRTKLRENLDRVRRMVEELVRMLES

SEQ ID NO: 25772 - protein, 60 aa, Artificial Sequence
  Synthetic
KDTLVKVLKEVLERHVEADEKAVRELAKVLEENVRLLEELVRVNKEVLRRILELVKELAK

SEQ ID NO: 25773 - protein, 57 aa, Artificial Sequence
  Synthetic
SKEEKLKDDVRRVLEDLDRVLKELEKLSEDNLRELKRVLDRITDLHRRILDELRKKI

SEQ ID NO: 25774 - protein, 59 aa, Artificial Sequence
  Synthetic
SKVAEDILRVLEKLVKVSREAIKLILELSEHHVRVSTRIARLLLDVARKLFEVIKEAER

SEQ ID NO: 25775 - protein, 57 aa, Artificial Sequence
  Synthetic
KKEDELEKMVRDVLEDLDRILREAEELSRKNNDDLRRVLDRLRRLAEEVIKRLEEKV

SEQ ID NO: 25776 - protein, 59 aa, Artificial Sequence
  Synthetic
SEVARVILEILKRLLKALKEAAEELKKISEHHLRVSEKVVRDLDRVVKKIVDVARRVAT

SEQ ID NO: 25777 - protein, 57 aa, Artificial Sequence
  Synthetic
SEKEKLLRDLEEVVRDVIRLSKESVDKLKETVDRLVEESRRTVEELRRIVDRVAKEV

SEQ ID NO: 25778 - protein, 58 aa, Artificial Sequence
  Synthetic
EIVKLLEDVVRELVEVLRKSTEVIERAVKKLVDILRESLKLIEDVVRRLVEIMEEIVR

SEQ ID NO: 25779 - protein, 61 aa, Artificial Sequence
  Synthetic
SEIEDVIRRLRKILEDLERVSEKLLREIKKILDEARRLNEEVIKEIKRVLEDAVRVFRDIR

SEQ ID NO: 25780 - protein, 56 aa, Artificial Sequence
  Synthetic
IEDLVREVERLIKRIEDSLRELEKTVRELLKRIKEASDKVREDVDRLIKELKEAAD

SEQ ID NO: 25781 - protein, 60 aa, Artificial Sequence
  Synthetic
SREEIVATLEDLARKILEVVKKLAKEIEDAWREIERKVREILKRLEELWREIEDVVRKKV

SEQ ID NO: 25782 - protein, 59 aa, Artificial Sequence
  Synthetic
RELVKELVELLEEILERNTRVIKEIIDLLRTVIRIHEKIVEDLIKLLEELLRRLEEATR

SEQ ID NO: 25783 - protein, 58 aa, Artificial Sequence
  Synthetic
KEKEDALKKLEDLARKSREDLERVLRKHKKILDKIEELLKRVLDEHKKIVDDILRKTG

SEQ ID NO: 25784 - protein, 59 aa, Artificial Sequence
  Synthetic
EELAREVERVIKELLDKSKEILERIERAIDELLKVSEEILKLSEDASEELLKILREFAK

SEQ ID NO: 25785 - protein, 58 aa, Artificial Sequence
  Synthetic
DEKEEALKTVERIIRDIVRRLRELLKEHEDIVREIERELKEVHEKHKRLVEKALEELG

SEQ ID NO: 25786 - protein, 59 aa, Artificial Sequence
  Synthetic
DRLADLIRRAVDRLRDISREILKRLVEVIERLLEVSEKILKLVEEVIRELLRVVEEAAK

SEQ ID NO: 25787 - protein, 59 aa, Artificial Sequence
  Synthetic
SVVEILAEVLKRLLDILRKLVDAIRDVVKKHVEVVEKLVRLHEEVLRRLVDILRKIAEV

SEQ ID NO: 25788 - protein, 60 aa, Artificial Sequence
  Synthetic
EEILRRLVEEAKRLVAESIKKLRDLVRKIREAHKEAIKRLEEIVRKVEEIVRKVIDELRK

SEQ ID NO: 25789 - protein, 62 aa, Artificial Sequence
  Synthetic
SDEEKLRRLLEEVRRLAKRVIDELERVLRESKRLAEENIEELDKALEEVKRLIDDVIKKLRD

SEQ ID NO: 25790 - protein, 60 aa, Artificial Sequence
  Synthetic
SETIERLLRELLKVLKEIVDRHRRIIERLLKASEDAVRELKKLIEETLRVLTDVVRRTET

SEQ ID NO: 25791 - protein, 56 aa, Artificial Sequence
  Synthetic
SLVDELRKSLERNVRVSEEVARRLKEALKRWVDVVRKVVEDLIRLNEDVVRVVEKV

SEQ ID NO: 25792 - protein, 56 aa, Artificial Sequence
  Synthetic
DEELKRVLEKAADLHRRLKDRHRKLLEDLERIIRELKKKLDEVVEENKRSVDELKR

SEQ ID NO: 25793 - protein, 55 aa, Artificial Sequence
  Synthetic
SKEERLREVAEKHKKDLEDIVKRVDEAAKETKRRLEEILKRLEEVLKKILDDLEK

SEQ ID NO: 25794 - protein, 55 aa, Artificial Sequence
  Synthetic
KEVLDILERAVEVVRRVIKALKEVLERHVDATREVIERVKRVNKRLLEAVREVVT

SEQ ID NO: 25795 - protein, 56 aa, Artificial Sequence
  Synthetic
SREEKLEELIKELERRLKDVLDRSRELNREIRKTTEEVIREVDRLLREIEKIVRDV

SEQ ID NO: 25796 - protein, 59 aa, Artificial Sequence
  Synthetic
EDTARLVREVAELIEKVVREIVKLIDEDLKKLERVVRENARLLREVVELLLKVVRDVAK

SEQ ID NO: 25797 - protein, 62 aa, Artificial Sequence
  Synthetic
DEKELLEEIIKKVEDLLRESRELWERLIKRVKELLKRSKETVDEILKRIKELLDELRKVAAE

SEQ ID NO: 25798 - protein, 60 aa, Artificial Sequence
  Synthetic
DKRLLDVIKEIVEKLIEVVRKLLEADKRIIEELIRVLEKIAEVDETIVKRLIEVLKKIAD

SEQ ID NO: 25799 - protein, 61 aa, Artificial Sequence
  Synthetic
SEEEDIERVLRELKKLHKDHLDLLREVVKRAEELLRRHLEILREVLKREKKLLKDVLRDAR

SEQ ID NO: 25800 - protein, 55 aa, Artificial Sequence
  Synthetic
DELLEEAKKLVKEVRELAEETLRRLARLVEDVKRLNDEAVKRLRELVRRIKEEVR

SEQ ID NO: 25801 - protein, 59 aa, Artificial Sequence
  Synthetic
RTEEILREIVDLLRRVAEENLRTLEELVELLDRVARRNLESLRELVRILEEVLKKLLKK

SEQ ID NO: 25802 - protein, 56 aa, Artificial Sequence
  Synthetic
EDVLRELDEVVRRVIERDREILRELKRLVEEVIRKNEDIVRKLEEAVERVLRKLKD

SEQ ID NO: 25803 - protein, 59 aa, Artificial Sequence
  Synthetic
SEKEEVIKDLRKVLEEVLRRHEELVERLKEVLRKVLEDHKKLVEDLKRVLDEVRRKLEN

SEQ ID NO: 25804 - protein, 57 aa, Artificial Sequence
  Synthetic
REELLRRLERIVEDIIRLLEESLKLAAEVIKTIIRLLEESLERLKRLVDDIVEKLRK

SEQ ID NO: 25805 - protein, 60 aa, Artificial Sequence
  Synthetic
SEKELLERLEEVERRLLEIVRRLLKRNRDVHEELLRIVEANLRRNKKVHEDLLEKVRKSV

SEQ ID NO: 25806 - protein, 59 aa, Artificial Sequence
  Synthetic
DKVVKELEDIVEELMEENKDSLRRLKEIVEELLEENRRVLEKLRKIVEDVARELEETAT

SEQ ID NO: 25807 - protein, 58 aa, Artificial Sequence
  Synthetic
SIEEVLREIVKLLREVLERLIRVDERLVEALKRVAEKNIEVLRRAVDALRKVLELLRR

SEQ ID NO: 25808 - protein, 57 aa, Artificial Sequence
  Synthetic
EETVIRRVEDVLRDLLRRLEEVVRRSTEEAKRLLKESRDVVRDVEKTLRELLEELRR

SEQ ID NO: 25809 - protein, 58 aa, Artificial Sequence
  Synthetic
SVEEVIRKAVTDLDRVLKTNIRVDERLIEMLKRVADENREVLEKIVRLLKEVLDLLRN

SEQ ID NO: 25810 - protein, 57 aa, Artificial Sequence
  Synthetic
EKEVVDKVKRVLDELRRDLERVVEESEKLARDLLRKSRDVVRRTRELLKKLLEEVET

SEQ ID NO: 25811 - protein, 64 aa, Artificial Sequence
  Synthetic
SRRETLEKLLKEIEDLIRESLERLEKLLEENRTLIDDDERRVRELARDIKELIKEIEERLRREN

SEQ ID NO: 25812 - protein, 55 aa, Artificial Sequence
  Synthetic
EEILKIIEELIKRLEKLNEDSNELMKELVKRNERLARENLKLVEELLRRIEETTR

SEQ ID NO: 25813 - protein, 56 aa, Artificial Sequence
  Synthetic
SEVERLRELVERWREELKKLLDELRKVVEEIARELKKINDELRKLVEDIAREARRE

SEQ ID NO: 25814 - protein, 56 aa, Artificial Sequence
  Synthetic
ERVIEELIRVLRKVVEDHADVTRRLVEVLRKVVKLIEEVLKKDEKVLRDIVDRLKT

SEQ ID NO: 25815 - protein, 57 aa, Artificial Sequence
  Synthetic
SEVEEVVRVLEKVLRLLRRLVEELHRLSERVLELITRLLKELKDLSREVIKRLEDAN

SEQ ID NO: 25816 - protein, 59 aa, Artificial Sequence
  Synthetic
KEKIDELRRVLERVEREHRRVIKKIRDVVEKVKRDHERVLREVEKVVREVRTELEKLRE

SEQ ID NO: 25817 - protein, 61 aa, Artificial Sequence
  Synthetic
SVEEELRELVKRVEKLVERLRRIVKEIIERSRDLVRKSREVVDRLKKELDELVKEVVREEG

SEQ ID NO: 25818 - protein, 59 aa, Artificial Sequence
  Synthetic
DEVIRRIAEVVKRLIDKLKELSDDNRKAVEDHERLVRKAIEELVREVEDILRRIDETAR

SEQ ID NO: 25819 - protein, 56 aa, Artificial Sequence
  Synthetic
SEKELLKEILDRIRELLEDDNRLLKRIVDEIRKLLEEWLRVHKEILERIKELLDRI

SEQ ID NO: 25820 - protein, 62 aa, Artificial Sequence
  Synthetic
EDMVRKIRKIIEELKRLLEDLRRDTRRVIEEAKRLLKEWRDRNKEVADTLKKLLEDLIRKIR

SEQ ID NO: 25821 - protein, 56 aa, Artificial Sequence
  Synthetic
REDEIVEDWRRLLEEAKRRSEEVAKEIRDRAREVTKESKRVADEWRRLLEEVKKRA

SEQ ID NO: 25822 - protein, 59 aa, Artificial Sequence
  Synthetic
EELVRVARDLVRLNEEVLRKSNRSVEELLKALARVLDRSNKSLEDLVELNKRVLDKLRT

SEQ ID NO: 25823 - protein, 59 aa, Artificial Sequence
  Synthetic
RKEDLVREWRELLRKILEDLEDLVRKWRKLLKKILDDLRELVRRVREELDKALRTVEKG

SEQ ID NO: 25824 - protein, 57 aa, Artificial Sequence
  Synthetic
LRDLVRKIIEIIEDILRLLEEVLRKNVKAVEEVLRLAIRVLEENIEAVEKVLEDVRR

SEQ ID NO: 25825 - protein, 58 aa, Artificial Sequence
  Synthetic
SEEELLREIEKILDEVRKLVEKLLEDNRRLADELIKLIKELLDRNLRLIERLLELLER

SEQ ID NO: 25826 - protein, 59 aa, Artificial Sequence
  Synthetic
EELREVLERALRKAKKIHEDLKRIVEDVRRRNDEILKDLERVLKEVEDKIRKILDELRK

SEQ ID NO: 25827 - protein, 59 aa, Artificial Sequence
  Synthetic
RDEDIKRELVRLVEEILRTSARLLDESIKSNKKTLDDIERVAREIVREIEELLKRIADG

SEQ ID NO: 25828 - protein, 55 aa, Artificial Sequence
  Synthetic
DELKKDIRDVLERVKRIAEELRELVERDIREDKRLLDELAKLWRDLLKMIEDLRR

SEQ ID NO: 25829 - protein, 61 aa, Artificial Sequence
  Synthetic
SEDELLEKIVRKLREAVKRIEEELRKSKREIERLVKEIKEKLEDSLRRVKETLDRIRETRK

SEQ ID NO: 25830 - protein, 56 aa, Artificial Sequence
  Synthetic
LEELLRLLKEVIERSIESLERLLELILRVLEYSVRSLEELLRRLLEVIKRIVDTTK

SEQ ID NO: 25831 - protein, 59 aa, Artificial Sequence
  Synthetic
DEDEIAEELKRLLREVEEKSKEIVRRMRELAREANKKSEDILRTLEKLLEELRRRVEEN

SEQ ID NO: 25832 - protein, 56 aa, Artificial Sequence
  Synthetic
IDEVVRRIERVIREVIKILARANKRLHDVVEEIIRLLEEVTDELRRVVEEVIRRTK

SEQ ID NO: 25833 - protein, 56 aa, Artificial Sequence
  Synthetic
DKEEEVRRLIEENLKKIEEVIRELEKIIRDNLRKLEEVVREIEEELETTLRLIETD

SEQ ID NO: 25834 - protein, 59 aa, Artificial Sequence
  Synthetic
EDLLRKLKELLETLKRRIDEIEKKLEEILKETKDLIRRLLEKLKRIDEELRKTLEDLRR

SEQ ID NO: 25835 - protein, 61 aa, Artificial Sequence
  Synthetic
DDIDEILRRLREEIEDARRKLEKILRELRERIKDYKRKTDELLKESRKRIREAEDRVRRDG

SEQ ID NO: 25836 - protein, 59 aa, Artificial Sequence
  Synthetic
DKVLEALLEKLLRSNEELVKIDRDLLRDLLRVLEELIKTVRDLLRELLRVLEEVAREIK

SEQ ID NO: 25837 - protein, 60 aa, Artificial Sequence
  Synthetic
REEETLRDIERLLRKLLEELKRTADELIDSHRKLIKKLKEILDRLRRSHEKLIETLRRRL

SEQ ID NO: 25838 - protein, 59 aa, Artificial Sequence
  Synthetic
EDVKRELREVVKEHKEDLDRIKKELKELLDRHTETLKRIVKKLRDLLEEIRKALEDLKK

SEQ ID NO: 25839 - protein, 59 aa, Artificial Sequence
  Synthetic
DEERVVEEAIRVLKEVLDLHRELIKRSIDVLKESLKVHERAVESLERVLKEILDLVRRG

SEQ ID NO: 25840 - protein, 56 aa, Artificial Sequence
  Synthetic
EEEVAERVKRIIEEVRKLAEDSRRKTEELIRRVKELAERTDETVRRVIEELRRRTK

SEQ ID NO: 25841 - protein, 59 aa, Artificial Sequence
  Synthetic
DEEDVARKLIEVLKELLKLVEDLIRTNIRVLEESLELHRRLIEEIEKVLKRILELLEEG

SEQ ID NO: 25842 - protein, 56 aa, Artificial Sequence
  Synthetic
REELAKEVKRVIEELKKLARESAEESKRIIRTIEELLREARKRAREVIEELKERTR

SEQ ID NO: 25843 - protein, 60 aa, Artificial Sequence
  Synthetic
DAEEVLRLLAEVLERIIELIKKVNEILIRVLREVIRLIEEVNELVREVLKRIIELIRRDI

SEQ ID NO: 25844 - protein, 55 aa, Artificial Sequence
  Synthetic
ERILEEIERLVREVEEIHERVLRRLKELLKKVREVHEEVLRRIERLAERVREALK

SEQ ID NO: 25845 - protein, 56 aa, Artificial Sequence
  Synthetic
SVREELEKVIREVIEEVERVLERIRDELRKSLERLKEVIKRIEDVHRDLIRRIREI

SEQ ID NO: 25846 - protein, 56 aa, Artificial Sequence
  Synthetic
IEEVLKTVEDISRRHRELLKRILDTSKRSIEETLKLAREILETLKRLLKELLDAAK

SEQ ID NO: 25847 - protein, 59 aa, Artificial Sequence
  Synthetic
DAEDEARRVIDEAVDRLRKAVEEIAEVARRHLEEVEEVVRKLEEIIRESLERVRRASEA

SEQ ID NO: 25848 - protein, 59 aa, Artificial Sequence
  Synthetic
DKEAEEVVRRVERLHEDVLRRLKEVVKRVKELHEEILDRLREILDRVRELARKVREDLR

SEQ ID NO: 25849 - protein, 56 aa, Artificial Sequence
  Synthetic
SEKERLSKIAEDLIRRLEEELERVERTHERLLRKLEELLKKIEKEYRDAMRKLETL

SEQ ID NO: 25850 - protein, 57 aa, Artificial Sequence
  Synthetic
IKEVLDDLKRVLERDLRAIKKIVKELKRILKENLDVLREIVERIKRVLEKILREVEK

SEQ ID NO: 25851 - protein, 60 aa, Artificial Sequence
  Synthetic
SREERLERVLERVKRAIDRYRDMLRRLLKTVEDLIRKYEEDLKRLLKEAKELIDKVKEEN

SEQ ID NO: 25852 - protein, 59 aa, Artificial Sequence
  Synthetic
EEIKKIIDRLREEIERILDELRRLNEELVETLRRVLETLRELNERLVKLLRDLLREEKK

SEQ ID NO: 25853 - protein, 60 aa, Artificial Sequence
  Synthetic
DEEEKMKKIEDVARRYKEEVKRVLDDLERLLRESEEEVERIVRKLEKLARDLEERVRELT

SEQ ID NO: 25854 - protein, 59 aa, Artificial Sequence
  Synthetic
KEVIDALKELLKVLEDLLREIKEALTRNLEKIDELLKLLHELSRRVIEELRKLLEDLKR

SEQ ID NO: 25855 - protein, 57 aa, Artificial Sequence
  Synthetic
REDEELARKAKEVLKETEDLLRKLEEEVKRVLEEIKRMNREVREKVKEVIKELRKRL

SEQ ID NO: 25856 - protein, 59 aa, Artificial Sequence
  Synthetic
KRLLDLLRDLLRLLKELLETLEKLNERTLKLLRDLLRKLKEALRRNLKLLRELVDEAAT

SEQ ID NO: 25857 - protein, 60 aa, Artificial Sequence
  Synthetic
SKDEIIKRIKDELEKLVRDVERLLRESERRIADLVRRVREILEESKRRVDELVKRVKETG

SEQ ID NO: 25858 - protein, 56 aa, Artificial Sequence
  Synthetic
VETILRVATEVVKESATVLKRILETLEEALKRNVRIIEEMLEILREVIERIARKLK

SEQ ID NO: 25859 - protein, 55 aa, Artificial Sequence
  Synthetic
SEEEILREIKRLLEEHLELNERILREIKKDNKRTLKELRDIVRELKEILERIKRR

SEQ ID NO: 25860 - protein, 55 aa, Artificial Sequence
  Synthetic
EELRKLLEDARRALERILRRLAKIVKEIKEKHEEVLRRLEKSVREIDERLRRARE

SEQ ID NO: 25861 - protein, 57 aa, Artificial Sequence
  Synthetic
SELERLERLLKEIVEVNRKALEDLRRVLEETVRRDREVLDRTRRKLEEIAEEILREL

SEQ ID NO: 25862 - protein, 59 aa, Artificial Sequence
  Synthetic
REDLKRLEDLVKRIEEELRRKLEKYERELRDLKRKLEELLKRYEEKVKELKRKLDEALK

SEQ ID NO: 25863 - protein, 57 aa, Artificial Sequence
  Synthetic
SEEEILRRIAEEIKRLIDEDLRLIEELVRKIKTVAKRDLELIARLVEKIEEVIRRSI

SEQ ID NO: 25864 - protein, 59 aa, Artificial Sequence
  Synthetic
EEELKTAEKIIEDIKKEIDDVHREVRRLLEEIKEDIDRVNEEVKKRLEDIIEKIRRAAK

SEQ ID NO: 25865 - protein, 59 aa, Artificial Sequence
  Synthetic
SIEELAEDIKKILDDALELLERLAKRAKEINDEILDELRKLVEKNKRDLDRALEKLRRE

SEQ ID NO: 25866 - protein, 58 aa, Artificial Sequence
  Synthetic
ERVRKLIRELEEELKDNRRLIEELVRRARKVNKRLRELVEEVIDRLRELLERIEEKIR

SEQ ID NO: 25867 - protein, 56 aa, Artificial Sequence
  Synthetic
SKEETLRKEAEDLLRRLEELTRRLEKKARELLERAKKLSRDLAEELKRLLKELREK

SEQ ID NO: 25868 - protein, 59 aa, Artificial Sequence
  Synthetic
ERLKRLVEELLKAVTDLSRKNKRILEELLKAIETLSDENKKILTEILDALRRLVEKIEK

SEQ ID NO: 25869 - protein, 60 aa, Artificial Sequence
  Synthetic
DEERKIVETLHRTSREVIKTLEKIVRDLKEVLKKNLELTERLIKRVHEVSREILRLTREN

SEQ ID NO: 25870 - protein, 59 aa, Artificial Sequence
  Synthetic
DRVKKELEDANREVNKKLEEVLREIRELHKRVLDRLDEVLRRVEEINKRVNERLDRTAK

SEQ ID NO: 25871 - protein, 57 aa, Artificial Sequence
  Synthetic
SEVEDLKRKLEEDLERHKKDVKRLKDEAERRLEEHKRLVEELERRIKKLLDELKDRN

SEQ ID NO: 25872 - protein, 55 aa, Artificial Sequence
  Synthetic
KDVLRDLERILTELAKALKDLIDNSRRTLEKLLKALRDLIRESKETLEEVLRRTD

SEQ ID NO: 25873 - protein, 56 aa, Artificial Sequence
  Synthetic
KEREEVKEKLDRLLEEVEKTVRELKREHDELLKEVEKLVRDLKKEHDELLKKVKDD

SEQ ID NO: 25874 - protein, 59 aa, Artificial Sequence
  Synthetic
KDRLDKVEELVKKLLEDTKRTVDRVRELVRKILKKSRETLEELERLIEKILRELEKDAR

SEQ ID NO: 25875 - protein, 56 aa, Artificial Sequence
  Synthetic
SERETVKRRLEELLKEVKRTLDKLKEEHDRLLEDVRRVVEELKREHDKLLKEVKDS

SEQ ID NO: 25876 - protein, 59 aa, Artificial Sequence
  Synthetic
DKRLEDISRLVKRLLDESRRVLRELEETIRKRAEESKRVLEEVKRLVEKLIRELRKEAE

SEQ ID NO: 25877 - protein, 59 aa, Artificial Sequence
  Synthetic
SEDEIIKKIIEDLRRVLKEVEEIHKEVEERLDKVLKEAEEMHKEVLKELDRVLDEVKRI

SEQ ID NO: 25878 - protein, 56 aa, Artificial Sequence
  Synthetic
ERLLEELIEELKDLIRRHIELLRRLIERLKELLKKHIEDLRRLLEEIEKLLEEARK

SEQ ID NO: 25879 - protein, 60 aa, Artificial Sequence
  Synthetic
SREDEVRKVVEKVLRDSKRSMKELRDVVTEVLKKSKEVLRELKEAVDRVLKKLKDISRDV

SEQ ID NO: 25880 - protein, 56 aa, Artificial Sequence
  Synthetic
EELVKELLEFLKRVLEKAERLVRKNLEDNKELLERLERLIEENLKLLEDLLRRTEK

SEQ ID NO: 25881 - protein, 59 aa, Artificial Sequence
  Synthetic
SEEEKLRELKEILDRTLKKIEDLIEESKRLNEEHVRLTREILDEIRRLLEELLRKLREA

SEQ ID NO: 25882 - protein, 59 aa, Artificial Sequence
  Synthetic
EEILKRIEDTLKRLKEELKRLVDEVRKHIEELLERSERLIRELRRTLEEILKRLKEKTD

SEQ ID NO: 25883 - protein, 63 aa, Artificial Sequence
  Synthetic
SAAELVLELLARVVKLLEEVLKRLIDLHRDVLKKIKDVLDRDHELHERVLRELVKVLREAERR

SEQ ID NO: 25884 - protein, 56 aa, Artificial Sequence
  Synthetic
REELEKRLRETLDEHRDLLRKLKEFLDRSLEDLERRVDEVRKELERVLEELKRKLK

SEQ ID NO: 25885 - protein, 57 aa, Artificial Sequence
  Synthetic
KEVEDIERVLRKALELSKKVSDDLERVLRELLKLSKEVIEKLVRVLEEILELLKREN

SEQ ID NO: 25886 - protein, 59 aa, Artificial Sequence
  Synthetic
EEDLRRVRELIKKVLKDLERVLKEAEDLHREVLEKLKDVVRRAAEMHEEVIRALKEVSR

SEQ ID NO: 25887 - protein, 59 aa, Artificial Sequence
  Synthetic
DEEELLREIKTILDESLKALEELIRKIMRILDKSLKDLEEIVREIKKTIDELLEKVRRS

SEQ ID NO: 25888 - protein, 55 aa, Artificial Sequence
  Synthetic
EEALDDLRRLVKELKDKLRKLLKDYKDLLKELKDEAKKLLDDYRRLIEELEKKAR

SEQ ID NO: 25889 - protein, 59 aa, Artificial Sequence
  Synthetic
SEKEKLDELRKLIEEIERELDRLLEDNKRAVEKVLRDLDRLLKKSEDDVRRVEEELDKD

SEQ ID NO: 25890 - protein, 59 aa, Artificial Sequence
  Synthetic
KDLAERIRKILDDLLEVHERVARAIEELLRELLEKNEEIVRTIKKLLKRLLDTLRKAAE

SEQ ID NO: 25891 - protein, 58 aa, Artificial Sequence
  Synthetic
SKLETVIRILEELVKVHEELLRIVKKILEELVRVHRRVSEENLRLWKELLDALREDKG

SEQ ID NO: 25892 - protein, 55 aa, Artificial Sequence
  Synthetic
EELLKRVEDVNRESRKVLEESLRRVEEALEKIERALRKSEEDIRRLMEDIKRVLK

SEQ ID NO: 25893 - protein, 60 aa, Artificial Sequence
  Synthetic
SREEKIEKLIRLVEELLERLRELLERNAELIKRLLDRLRELLKELERLNEELLKKLLEKV

SEQ ID NO: 25894 - protein, 55 aa, Artificial Sequence
  Synthetic
RELEELIKKVERDHERVIKEVEKLVKELLDRSEEIHKRAKELIKEVLDRVREAAR

SEQ ID NO: 25895 - protein, 60 aa, Artificial Sequence
  Synthetic
SREELLDRILEAIAKILEDLKRLIDENLRRLEEVVRELERIIDRNLKLIREILDELKKRG

SEQ ID NO: 25896 - protein, 59 aa, Artificial Sequence
  Synthetic
DEIIRKLDELLKEVEKVHKEVKDRIRKLLEDHKRSLDEVKKKLERLLERAKEVVEREKK

SEQ ID NO: 25897 - protein, 61 aa, Artificial Sequence
  Synthetic
SEREELLERIKEILKRVKDKLDEDLKRLKEILEKLKEKADRDLEELRRRIEEVREKLERTG

SEQ ID NO: 25898 - protein, 60 aa, Artificial Sequence
  Synthetic
SETAVRAIIRVLEKHLEAVRRVLEELLKVLAEHLETVRELIERLKRVLEEAIEVVERVAR

SEQ ID NO: 25899 - protein, 60 aa, Artificial Sequence
  Synthetic
DEERKLKELLDRLRENIRALRELIKDNLRLLKTLVDALEELLKDNLRLLRELAEEAARRL

SEQ ID NO: 25900 - protein, 59 aa, Artificial Sequence
  Synthetic
EKDVRELIKRVETALRESEEKLRRVAEELKKALDRSRKDLEEVVRRTEDLLRRLEEKLR

SEQ ID NO: 25901 - protein, 60 aa, Artificial Sequence
  Synthetic
SEEETVRRLLELLKENIEELRELLKRNLDLLRKLAEELKKLIEELARITERLAEKLAKDL

SEQ ID NO: 25902 - protein, 59 aa, Artificial Sequence
  Synthetic
EEEVRKLVEELRRAVKRVRDLLDELRRRLEEALRKSKRELETIEERTRRLLEDIKRDLD

SEQ ID NO: 25903 - protein, 60 aa, Artificial Sequence
  Synthetic
SEEEEIVKRLKELIKRNLELLDKTLKELKKTLEDIIRTLTELVKRAKEINKELIDRLREK

SEQ ID NO: 25904 - protein, 56 aa, Artificial Sequence
  Synthetic
REDIRRYEEKLRKLVEEVKKKLRDLEERLRRLVEKIRKLLEDSERRLRTMLDEIRR

SEQ ID NO: 25905 - protein, 61 aa, Artificial Sequence
  Synthetic
REKEEKVKKVREVVTELKRELDDMLRRVKEAHERLKKKHDDLLKEVREVHKRLKDRLDERG

SEQ ID NO: 25906 - protein, 59 aa, Artificial Sequence
  Synthetic
EEIKKTIEEIIKVLRELNDKLRRLSEDTIRVLEELNKEIARLLEKLVRDTKRLLDELTK

SEQ ID NO: 25907 - protein, 59 aa, Artificial Sequence
  Synthetic
SVKEVIKEVLDRVVKLIKDVIDALKTVLDRHLRLNRENIRALLEVLERILELLEELVRK

SEQ ID NO: 25908 - protein, 57 aa, Artificial Sequence
  Synthetic
LEKLLRKVRKIAKELADELRKLHREVKETHEDLKRKLDKLLKDIRKVVEDIKREVDR

SEQ ID NO: 25909 - protein, 60 aa, Artificial Sequence
  Synthetic
EKEELVEEILRRLKKMSERFSRVVEEILKLLEDSSRKVEEAIRRTIRELEKTLKRVEKDG

SEQ ID NO: 25910 - protein, 56 aa, Artificial Sequence
  Synthetic
SRELREAVKKVIADLEKILKDLRKLDKESLDKLREILKTLRDLDRKSLEELEEIRR

SEQ ID NO: 25911 - protein, 58 aa, Artificial Sequence
  Synthetic
SREEKLREDLDRVFRKNEEELKRVEKEVKKLLDDSKRKLDEVKKELEDLLEKIKRLLD

SEQ ID NO: 25912 - protein, 60 aa, Artificial Sequence
  Synthetic
DEELLRALKEVVRKVIEIVRRLLELHRETVKELARVIKEILRLHLESIKKLLDVVREVLR

SEQ ID NO: 25913 - protein, 59 aa, Artificial Sequence
  Synthetic
DEEEKVRRLKELLDRTLKKLKELVEEHDKILDELLKKLEELVRRHNKLLDDLLRRVEER

SEQ ID NO: 25914 - protein, 55 aa, Artificial Sequence
  Synthetic
EELEDTVRKLLETSKKLLDEAREVLERLHRRSEELLRRVEETLRRLEDEVRKITK

SEQ ID NO: 25915 - protein, 59 aa, Artificial Sequence
  Synthetic
DKEDKLRKIKELIRKLLETIKRLVEEHDKELDETLKKLEDLVREHDRLLDETLKRLEER

SEQ ID NO: 25916 - protein, 55 aa, Artificial Sequence
  Synthetic
EELERDLERLEKTSEDLLRRVKEEIDRLHERSKKLLDEARKKLEELLKTVKDIAK

SEQ ID NO: 25917 - protein, 60 aa, Artificial Sequence
  Synthetic
SEREELARDLDDLRRRLREAAEELKKKHEKLRRELEELAKELRKRHEELKKELDDAARRG

SEQ ID NO: 25918 - protein, 56 aa, Artificial Sequence
  Synthetic
EEVLKRILDKLMKVSEDVLRKLEDLLREVIELTKKVLDLLDELLKRVKKVLEEVMK

SEQ ID NO: 25919 - protein, 60 aa, Artificial Sequence
  Synthetic
DREKKVRDIEEDLKRVLDKLRRRVETSKEELKKVLKRDKENADELEKTLRDVVRELDRKI

SEQ ID NO: 25920 - protein, 56 aa, Artificial Sequence
  Synthetic
SEVAKELDEVIKRLLDNLKENTDRLKEVIDRNLKDLRDLAEELRRVIERLLEDARR

SEQ ID NO: 25921 - protein, 58 aa, Artificial Sequence
  Synthetic
DKEEVLKDIKRKLDDHRRRTDEIVERLERLLKEHEEKTRRLLEDVRKKLEELKEIIKR

SEQ ID NO: 25922 - protein, 56 aa, Artificial Sequence
  Synthetic
EEVLKRILDRIEELLRRLVKVNTDSLRELKRVVDELVKVDRESLRELERVLRELTK

SEQ ID NO: 25923 - protein, 60 aa, Artificial Sequence
  Synthetic
SKEEEIVRELEKILRDHLRKVERIVEDLEKLLDDHLKKIEELAKRLEEIIREAARKLEEK

SEQ ID NO: 25924 - protein, 59 aa, Artificial Sequence
  Synthetic
EEVKELLKRVEKLIDDVRKKVEDLHRELEKALRDIDRKVKRLNEELERLVEEVEEKVKT

SEQ ID NO: 25925 - protein, 57 aa, Artificial Sequence
  Synthetic
SESEELRRKLEELEKELRDVLTKDRKMLEDLKRRLDKLVKDSERRIRELKRRLDEKI

SEQ ID NO: 25926 - protein, 55 aa, Artificial Sequence
  Synthetic
REIVEELRKVIEDHERLVREILELLRKAIDDNHKLVRDLLERLKRALDETREDRR

SEQ ID NO: 25927 - protein, 58 aa, Artificial Sequence
  Synthetic
RETEETLKKLEKLLRKMLEVSKRLNEEDEKLLRTKRKLIEDLLRRVEELLEETRRVVS

SEQ ID NO: 25928 - protein, 56 aa, Artificial Sequence
  Synthetic
KDLVETLKRKLDKLLRDIRELAKDYKRKLDRLLEDVERLHRELKKELDELLKEVKD

SEQ ID NO: 25929 - protein, 59 aa, Artificial Sequence
  Synthetic
SELEKLLTDLERVIRKVVEDLRRLLEEHKKALDEDKKRDEDSNEELADAIRKVIEKLKR

SEQ ID NO: 25930 - protein, 56 aa, Artificial Sequence
  Synthetic
EEDTKRLLEKIHDDHRKLVEENERLLREDHKTLEDLIRKIKKLAEEILELTARETK

SEQ ID NO: 25931 - protein, 62 aa, Artificial Sequence
  Synthetic
DEREVLKEILDLVRRLLELALEILKRSLELLRRLAEEAKKVLDRSVELLRRLVREAKEAAKN

SEQ ID NO: 25932 - protein, 56 aa, Artificial Sequence
  Synthetic
DELVKEVEDRLRESEKKLERLLEDVERLLRENEERLRRLLEEVERLLRELAETLER

SEQ ID NO: 25933 - protein, 56 aa, Artificial Sequence
  Synthetic
SEKEEVEKRLKKVDEDTKRAVEEVKKAIEEVLRRHEEASKRVEEAIRRVLKELEDL

SEQ ID NO: 25934 - protein, 57 aa, Artificial Sequence
  Synthetic
REELLERLKELIKRLLEALKRLDEEVSKLIDELLKRLEKLAKEVLDLNRELLERTRR

SEQ ID NO: 25935 - protein, 60 aa, Artificial Sequence
  Synthetic
SDEERLDKVLKEAEDIIRELERLLRESLETLKRLIERLEKLLRDSLEELRRLIEDLARKR

SEQ ID NO: 25936 - protein, 59 aa, Artificial Sequence
  Synthetic
EDVVRMLKEVSRRDEELTRRLLRMAKKLLEDNEELSRRLVKKLDEVLKRVEEIIKRETD

SEQ ID NO: 25937 - protein, 60 aa, Artificial Sequence
  Synthetic
SREERIRKLAEDLKRKIEELLRRVRKLAEEHKRLIEKILEESERLAEELKRRAEELKKRL

SEQ ID NO: 25938 - protein, 59 aa, Artificial Sequence
  Synthetic
KEVLDELRRLLELLKKLVDRLLELNKRLNDHAKKLVEDLLRLLKKLLEEIKKLVDDARR

SEQ ID NO: 25939 - protein, 61 aa, Artificial Sequence
  Synthetic
SEEERLEEEVRRELERYRRTVRRLAEEVKEELERYEREVKKEEEKLEKTLEDLERELTRDG

SEQ ID NO: 25940 - protein, 57 aa, Artificial Sequence
  Synthetic
KKTIAEELKRVLRELTRILRELVKLNSDVVRRLLEVLTRLAKLSEDVVREILEIERE

SEQ ID NO: 25941 - protein, 59 aa, Artificial Sequence
  Synthetic
SEEEKLETVREELRRALERIEELITKNEKKIEDTLRDIRREIEENARTVKEALERIKKD

SEQ ID NO: 25942 - protein, 59 aa, Artificial Sequence
  Synthetic
KEKVDRTKEELERLKKEHRERVEETKRKLDELKKEHEREIRKTETDLRRLLKELADRAK

SEQ ID NO: 25943 - protein, 59 aa, Artificial Sequence
  Synthetic
SEDEKLRKLVEEVERTLKKLIDYLRENVEDVDRILRRLKELIDRHLKKVRELIEKLLRG

SEQ ID NO: 25944 - protein, 59 aa, Artificial Sequence
  Synthetic
KDTVREIEKDLEDSKRELERIKEEIEELLKRLEDKNERAIEEIEEDLKRLEERLREAAK

SEQ ID NO: 25945 - protein, 59 aa, Artificial Sequence
  Synthetic
SEEEKLRKTEEDLKRTLEELKKILDDHLRIIERLLREIKRVLEENKRNARRLLEEIKRS

SEQ ID NO: 25946 - protein, 59 aa, Artificial Sequence
  Synthetic
ERVLKRLEKELRDHLKRLEEIIKRLEEDLKKTLDELKRTIEDAERKLRDLERKVKEDAK

SEQ ID NO: 25947 - protein, 59 aa, Artificial Sequence
  Synthetic
SILERLVRELIRLLRELLRIHKELVERVIRVLERLLEVHKKLVETIERLLDKLAELVRR

SEQ ID NO: 25948 - protein, 56 aa, Artificial Sequence
  Synthetic
KREIEKVLREIKEELRRSLRELKRVLDEVKERLKESLERLRKLIEEIKERLDRIRK

SEQ ID NO: 25949 - protein, 59 aa, Artificial Sequence
  Synthetic
SLEEITKRLLELVEENLRRHEEILRELLELAKRLAKEDRDILEEVLKLIEELLKLLEDN

SEQ ID NO: 25950 - protein, 60 aa, Artificial Sequence
  Synthetic
ERTLREVVRKVLEEAKRLLDELEEVHKRVKKELEDIIEENRRVVKRVRDELREIKRELDE

SEQ ID NO: 25951 - protein, 60 aa, Artificial Sequence
  Synthetic
SKIEEVLERAKEVLDRLLDLHRRLVKEIEDVLDRSNELLDRLLKELEKVLDELLDIVRRR

SEQ ID NO: 25952 - protein, 59 aa, Artificial Sequence
  Synthetic
EEALKELKERIEEIKKTLRELLKELKKLNREIKETIKELSERLARAVEKIKRELEKLRK

SEQ ID NO: 25953 - protein, 60 aa, Artificial Sequence
  Synthetic
KAEEAVEKLVRIARAIVKINEDLSREVVRILREIVRLNEETTRLLVEIAREVVKVVEDAG

SEQ ID NO: 25954 - protein, 59 aa, Artificial Sequence
  Synthetic
EELLRRLEELRKRLEKVLDDSRKELEKLKRELERLLEESRRKLEKLKRDLERVLEETRR

SEQ ID NO: 25955 - protein, 59 aa, Artificial Sequence
  Synthetic
DDRRILKLLIDIIRKLVKLNEETADKLIRVIDELLKMAEESLKKVIDLVRTLVEIIRRE

SEQ ID NO: 25956 - protein, 56 aa, Artificial Sequence
  Synthetic
RKVVEELLRKVEKLIKDIRERYERLVKKVRDLVERWKELVRRLLKKAEDVIREIEK

SEQ ID NO: 25957 - protein, 58 aa, Artificial Sequence
  Synthetic
DEEDALRTIEELVKRVNEENKKILDESEDLVRRLNEKNERINKESRDLVKKLREDAED

SEQ ID NO: 25958 - protein, 55 aa, Artificial Sequence
  Synthetic
ERVLKLVEDAAREDERLNRELDRATREVAEEDKKLNEDIDKTLNDVIRELLEAAR

SEQ ID NO: 25959 - protein, 58 aa, Artificial Sequence
  Synthetic
SSVETIKKLVEDARKKLEDSIRKIEKLVRDVEKTLRDSLKRIRDLVEKVVRTLRELLR

SEQ ID NO: 25960 - protein, 57 aa, Artificial Sequence
  Synthetic
LEELVKRITDILREHVKMHEDLIRAIAKVLRDHVEAHKRLIKRITEILEEVVKAVTD

SEQ ID NO: 25961 - protein, 59 aa, Artificial Sequence
  Synthetic
DTKEEIKKLVEELLRLIEELIKRTEELNKEDNEIAERVVETHSRILRDLLRSLEEVART

SEQ ID NO: 25962 - protein, 59 aa, Artificial Sequence
  Synthetic
DDELREVLDRIRERVKRSEDKLREVLERLKRDSKRIHKDLRKALEEAKKDVDEIRKETE

SEQ ID NO: 25963 - protein, 56 aa, Artificial Sequence
  Synthetic
RREEELKRIIREIERILEELRRRSREIEEKLKKVLEEHERVSRRIKERVEDLKRKV

SEQ ID NO: 25964 - protein, 56 aa, Artificial Sequence
  Synthetic
EKDIERIVEEALKLHEDVHDENRRILEEAIRTHREVIKRLEEIVKEAIKLIEDVTR

SEQ ID NO: 25965 - protein, 56 aa, Artificial Sequence
  Synthetic
SEKELLEEIEKRAEEVLREHDKRSEEIKRELERVLKELRDLSRKIEEDLERLVREV

SEQ ID NO: 25966 - protein, 56 aa, Artificial Sequence
  Synthetic
KKDIERIVRELIKVHRDVLRKLEKVVREALELHDRVNKELREVVERALRLLREVTR

SEQ ID NO: 25967 - protein, 58 aa, Artificial Sequence
  Synthetic
SEEEILKKIEDRLRAITEKHERMLREIKKELKKVMDEHEDLLRKIEKELRDVLERLRR

SEQ ID NO: 25968 - protein, 56 aa, Artificial Sequence
  Synthetic
ATLLERIVERARRELTKNHDKLRKILERLERILRELNEDLRRILTTAVDILRKLRK

SEQ ID NO: 25969 - protein, 60 aa, Artificial Sequence
  Synthetic
REDEVLRDIERLLREIEEKIRRILEESTRELRKVEEEVKRIIERTKRELKKIKEDVERKG

SEQ ID NO: 25970 - protein, 56 aa, Artificial Sequence
  Synthetic
RDLLEKIKRVIREHIKALEKLARDLKEILRRHIEALKELARDLAEVIRKLLEDVKR

SEQ ID NO: 25971 - protein, 59 aa, Artificial Sequence
  Synthetic
DLERLVELLKRIDDEAVKLVRKLVEVLKRIDEELVRLVEELLRALRRINEEVVRLVKRV

SEQ ID NO: 25972 - protein, 56 aa, Artificial Sequence
  Synthetic
EELLKRLRRIVEESKRRVDELLKELRKISEDVAREVERLLRELERISREVKRRVEE

SEQ ID NO: 25973 - protein, 59 aa, Artificial Sequence
  Synthetic
SDEEVARELSDIVRKLVERNKESIEDAMRIVKELVDRNKKVTEDVLRLLEKLLEDVRDT

SEQ ID NO: 25974 - protein, 56 aa, Artificial Sequence
  Synthetic
EEFLRRLKEEVRKIVEKVKRDLERSLKELERILEEVKRMLERSLRELERVLKEIKD

SEQ ID NO: 25975 - protein, 56 aa, Artificial Sequence
  Synthetic
SKEEILRELEELSRRLVEKLKDLLRKLEKLSDEVVKELRKSLEELKDLADKMVKKL

SEQ ID NO: 25976 - protein, 55 aa, Artificial Sequence
  Synthetic
RLLEEIVKLLRDVAKRNLDLLEKHRELLERALEEVKRLLDEHLKLLRDALRRLKK

SEQ ID NO: 25977 - protein, 58 aa, Artificial Sequence
  Synthetic
SREDLLRKLKELIETILRKSSELLDRLLKLVREHSETSERLIRELKKILEDILKLIKG

SEQ ID NO: 25978 - protein, 56 aa, Artificial Sequence
  Synthetic
EKELRRIKEAVERVLRDHKRKNDKILRDVEEVLRRHLEELRRILKDVKKVLDEARK

SEQ ID NO: 25979 - protein, 58 aa, Artificial Sequence
  Synthetic
DDEELLKRLEDLDERLLRFSKENLEELRRRTRELIETSETLLERLREIIETILKVIRD

SEQ ID NO: 25980 - protein, 56 aa, Artificial Sequence
  Synthetic
ERFLEEIAERVERILKEHRELLKRIEDEVRRVLTEHKKKLEKLKREVERVAEETKT

SEQ ID NO: 25981 - protein, 57 aa, Artificial Sequence
  Synthetic
KETDEVVKRAKELVDTLLKVIKEHVERLKRLVEELLKVIRDHVRILRELAKRLREKV

SEQ ID NO: 25982 - protein, 59 aa, Artificial Sequence
  Synthetic
SDVERVLEELRRRLEKSVEEVERVLKRLKEELDKSVEEVKDVLRRLLEDLKRVVEELRR

SEQ ID NO: 25983 - protein, 59 aa, Artificial Sequence
  Synthetic
SEEERVLEEIKREIDRIVKRARELLEKYRELVERIKRRNEEILKKYEKLLEEIERLADA

SEQ ID NO: 25984 - protein, 56 aa, Artificial Sequence
  Synthetic
ERDLKRALRRHAEELTRLNKELNELLKEHEDELRRLLAELDRIVRKLLRTLKELTE

SEQ ID NO: 25985 - protein, 60 aa, Artificial Sequence
  Synthetic
SKEEEAKRVIDELREELRRILRENTELVKESERRITELLKENSDLVEEVRRRLEEVLEKE

SEQ ID NO: 25986 - protein, 55 aa, Artificial Sequence
  Synthetic
EDLKRLVDDVLRLAEESHRKIEELNRRTLKLMEDSHRKLKELVRKALELITELTR

SEQ ID NO: 25987 - protein, 59 aa, Artificial Sequence
  Synthetic
DSIERLAEELDKIVTDVLRVNEDSVRTWTRILEEVLRLNRELARILIDIARRVLELVKR

SEQ ID NO: 25988 - protein, 60 aa, Artificial Sequence
  Synthetic
EKELLDEVRRLLKRVKELLKRSIDLVEKILRDVKRLLDESIELVKRVLDKIRRLLEELAR

SEQ ID NO: 25989 - protein, 60 aa, Artificial Sequence
  Synthetic
SEEDEVLKTLDRKHKEAKKELDKVLRELEEEHKKVKRELDEVLKRLEDIHRRITELLRRG

SEQ ID NO: 25990 - protein, 56 aa, Artificial Sequence
  Synthetic
EEAVERVLKENKELIEEIVRLIRKILDENIELIRRIVRLLERLLRENLRLIEEARK

SEQ ID NO: 25991 - protein, 61 aa, Artificial Sequence
  Synthetic
SKEEDVRRLIEELVRELRRILEENRRMLKELVEKLEEVLRRSEEVWRRLAKELDELLKELN

SEQ ID NO: 25992 - protein, 59 aa, Artificial Sequence
  Synthetic
EEVIKKIEDLVRKTERELREVHKELRRLVEEAKEVVDRSVEILRDLVRKIVRILEESAR

SEQ ID NO: 25993 - protein, 58 aa, Artificial Sequence
  Synthetic
STEDELRKIKEELEDIRRRIEELDKKDNEDLDRIDEEIKRRLDKNIRDLDEIAKEVRK

SEQ ID NO: 25994 - protein, 60 aa, Artificial Sequence
  Synthetic
KEELAEITERLLKKYREVAEENMRSLKELLREYREVNTRTHKALERIIDRIREILEKVRK

SEQ ID NO: 25995 - protein, 59 aa, Artificial Sequence
  Synthetic
KEKEAIKEVAELLKRLIDDLLRLLKEDVDTARRVLDEIKKLLEENERIAREVLRRLRED

SEQ ID NO: 25996 - protein, 56 aa, Artificial Sequence
  Synthetic
ETDLDRIVKEMEKVLEDSIRELEKLVKRLEDILRESEKALRDLLRELRKVLEEVRT

SEQ ID NO: 25997 - protein, 56 aa, Artificial Sequence
  Synthetic
SSMETAVKLVKDLLREDIRSNEEHVRLAKKLLEEDIESNERLLRILKKLLDLVEKT

SEQ ID NO: 25998 - protein, 56 aa, Artificial Sequence
  Synthetic
REELRRVAEEIKRRAEELLRRTEELVRDILRRHEDALRRTEELVRRIEKRLRDATR

SEQ ID NO: 25999 - protein, 61 aa, Artificial Sequence
  Synthetic
RELEDVLRMIEELARRLVEILERHNKLSKRVIELLVRILEEHLKLVAELIKKAVEILRRIL

SEQ ID NO: 26000 - protein, 59 aa, Artificial Sequence
  Synthetic
DDIRKLLKELLDDVKKIIDDSRRLLDELRKELEKILKESEKLVDELREAVDRLIRKVRE

SEQ ID NO: 26001 - protein, 58 aa, Artificial Sequence
  Synthetic
SREELLKELRKLVEEIKRRSEELLRRLEKLLEDNERRTRELLERLKELLREIEERIRG

SEQ ID NO: 26002 - protein, 56 aa, Artificial Sequence
  Synthetic
RDIVRELTELVRRLLKRVEELLKRSLEILRELIKAIADAIKESLDILDRLLREVAR

SEQ ID NO: 26003 - protein, 59 aa, Artificial Sequence
  Synthetic
EEEEVLRRLRELIERLVRETEEKLKEIERRIEEVLERHRRALEELKKEIDEILEEAERR

SEQ ID NO: 26004 - protein, 60 aa, Artificial Sequence
  Synthetic
EEALRRLVEKVKRVLEEILKVSEEVLEKVKKVLTDILKRLKELVERNVRLLERILDEARR

SEQ ID NO: 26005 - protein, 57 aa, Artificial Sequence
  Synthetic
SKIEKLLRVIKKIIDKLEELLKRLLEVVRESIELLKRILDELLKVVERTADELRRIV

SEQ ID NO: 26006 - protein, 59 aa, Artificial Sequence
  Synthetic
KDLERLLRKVKEDNDRVKKEVERLLKEIEDRNRKVVEEIKRRLEEIKRELDKVVEEIRR

SEQ ID NO: 26007 - protein, 57 aa, Artificial Sequence; identical to SEQ ID NO: 26005
  Synthetic

SEQ ID NO: 26008 - protein, 59 aa, Artificial Sequence; identical to SEQ ID NO: 26006
  Synthetic

SEQ ID NO: 26009 - protein, 59 aa, Artificial Sequence
  Synthetic
KDEDKLRRIVAVLEDLIRLTEELAKILKRVTERLKELTEELKRRNEKVVEEILKLLRDS

SEQ ID NO: 26010 - protein, 56 aa, Artificial Sequence
  Synthetic
EEVVRRIRELATKNLDDNRKALEESRRIIEEIVKRIKDVIRTSREIIKELRKEIRT

SEQ ID NO: 26011 - protein, 56 aa, Artificial Sequence
  Synthetic
KEAEELVEVVRKHIKTLAEIWKKLVDALRKHVEILRRLLKELVEVIRRAIERVRRD

SEQ ID NO: 26012 - protein, 55 aa, Artificial Sequence
  Synthetic
ERLDTVLEELRRVLKELERKLRESIKELRDVLREVEERLKESIEELERVLDRLRR

SEQ ID NO: 26013 - protein, 57 aa, Artificial Sequence
  Synthetic
SEEEIAERVKDLIRRVLEEHERSVKKVEDLIERVLREHRRVLEEVRRLAEELERRLG

SEQ ID NO: 26014 - protein, 59 aa, Artificial Sequence
  Synthetic
DRRKDDLRRVLEELLKRLKELLEELKRINEELLKTLEKLARDNLEINKELIKRLDEETR

SEQ ID NO: 26015 - protein, 59 aa, Artificial Sequence
  Synthetic
SEEDVLRKLEEIVEELERSNRDAVRRLEEVVKRVEDLWEEVVRRLRELVREVEERLRDV

SEQ ID NO: 26016 - protein, 55 aa, Artificial Sequence
  Synthetic
KEIEEIIERVLRLLAELLKRVKRISEDLKRLLDELIEENADILRKLDELVTRDET

SEQ ID NO: 26017 - protein, 60 aa, Artificial Sequence
  Synthetic
DKERIIKRVLDELKEALKKAEKLHEDVLRELRRLLDEALKLHEDVLRELEELLRKIESTL

SEQ ID NO: 26018 - protein, 59 aa, Artificial Sequence
  Synthetic
REKVEELADEIRRVVKRIEERHDKLRKDIERLVRRIEELHKRLLEELEELVKRITEELK

SEQ ID NO: 26019 - protein, 57 aa, Artificial Sequence
  Synthetic
SVLETIVDIVRKLIELIEKLLRDLLELDKRNVDAVARNADKILKIAEDIVRTIASKG

SEQ ID NO: 26020 - protein, 55 aa, Artificial Sequence
  Synthetic
EDLKRELDRLIKEIEESNRRLKKTTKDLVDEVERILRKIKDDIEDVKRKIEEDKR

SEQ ID NO: 26021 - protein, 59 aa, Artificial Sequence
  Synthetic
SEDELLDRLDESVKEVLDRHRKLLEDLADTIRRVIKKVKDLLDEHKKTLEDVIEKVLRR

SEQ ID NO: 26022 - protein, 59 aa, Artificial Sequence
  Synthetic
ETVVRDLRRLLEELRRISEEIVRDLRRLLEELKKIVEDVVRESKKLLDDLRRIIDETVR

SEQ ID NO: 26023 - protein, 59 aa, Artificial Sequence
  Synthetic
SRAERLADEVRKAVKKSEEDNETLVREVEKAVRELKKNNKTWVDEVRKLMKRLVDLLRD

SEQ ID NO: 26024 - protein, 60 aa, Artificial Sequence
  Synthetic
SEELVRIAIEVLKRLLEIIEELVRLNNEILERLLKIVRELHKDNIKILEDLLRIIEEVLR

SEQ ID NO: 26025 - protein, 57 aa, Artificial Sequence
  Synthetic
SEVETLIRLIEENLRLLKEVADLSLEVIERLLRILKEIVKRSLDVIRRLLKLIEEVL

SEQ ID NO: 26026 - protein, 55 aa, Artificial Sequence
  Synthetic
ERAKKRLEDLLREHREILKEVVKRLKELLDRHRKLLDEARRESKRVLDEIDEKTK

SEQ ID NO: 26027 - protein, 57 aa, Artificial Sequence
  Synthetic
SRVETLIRVVEKNLELLREIVERSLRVIKKNLRLLEEVARLSLKVIKELLEEIKRRV

SEQ ID NO: 26028 - protein, 55 aa, Artificial Sequence
  Synthetic
RRVKEELKRLLEKHRELLKEAVKRSEDVLKEHKEVLDDVRRESEKVLEELRRAET

SEQ ID NO: 26029 - protein, 61 aa, Artificial Sequence
  Synthetic
SEKDEVTRRIRELLKEAEETNREAIERIKRLLDRVREKVEEVAKRSEELLRRLKKVLDRDL

SEQ ID NO: 26030 - protein, 57 aa, Artificial Sequence
  Synthetic
KEDLLREIARILRESLRLIRELLKEIEKIVKEIIELLERLNDELRKIIEKILETTKK

SEQ ID NO: 26031 - protein, 59 aa, Artificial Sequence
  Synthetic
SRKELLKKLREVLETNLKLIEDLVRDIERALEEDRKLIEDLLRRIEEVARRILELRERG

SEQ ID NO: 26032 - protein, 56 aa, Artificial Sequence
  Synthetic
DKRLREVIKRLIEELRRLLKEYEDVLRKVREDLKKLLEEYKRVLERVDEELRKRDK

SEQ ID NO: 26033 - protein, 59 aa, Artificial Sequence
  Synthetic
DEEKRVEDVLRRVEDLLRKLEEEHRRIVKRIRDELRESERKIEELVDRLRKEIDRIRKT

SEQ ID NO: 26034 - protein, 57 aa, Artificial Sequence
  Synthetic
KEDLLRRTEKVEREIRKTLDDLHERTRRVVEETLRKNEELLKEIKRVVETILDEIRK

SEQ ID NO: 26035 - protein, 57 aa, Artificial Sequence
  Synthetic
SKKETLVKLAEEIIADIHRVNRESLELIKRLIERVEKLTKESLDSIRKLIERILRDI

SEQ ID NO: 26036 - protein, 55 aa, Artificial Sequence
  Synthetic
DEVREIKEKVRELIDKDRRLVKEIEDLAREILDTDRKLVKRLEEVVRELIERARR

SEQ ID NO: 26037 - protein, 59 aa, Artificial Sequence
  Synthetic
DEERVLTEIEKLVKRLKDRNDEIRRELEKTSKRLEEELERIERELDRLVEELKKELERT

SEQ ID NO: 26038 - protein, 56 aa, Artificial Sequence
  Synthetic
DKDLEDLIRRVLTRVKELARRLDRKNKELLKEIERLIREDKETADRVKTEIKKKTD

SEQ ID NO: 26039 - protein, 62 aa, Artificial Sequence
  Synthetic
DEEELVRRVEKLARDIEETLERLVKELERLYREIEKELKRLVKELEDANRRIVKRLKDLFDK

SEQ ID NO: 26040 - protein, 60 aa, Artificial Sequence
  Synthetic
DEEVLRRIEKLNKELEDVLREVEERIRKLLRELEEVSRRVTERIKRLEDELRKAFEEVTR

SEQ ID NO: 26041 - protein, 64 aa, Artificial Sequence
  Synthetic
SKKEDAIRKARKLLERIRRLADKAIKRSRRLLERVRELVKESLDILRKLLERLRDLVRKIKKDG

SEQ ID NO: 26042 - protein, 55 aa, Artificial Sequence
  Synthetic
DELRRLTEEILKLHEESVKKLEDLTKEALEASEDVHRKLEKLTEEILRRTEEAEK

SEQ ID NO: 26043 - protein, 59 aa, Artificial Sequence
  Synthetic
KEKEEADRELRELKREMEDILREVEKELRELLKKSEELLEEIERLSKELTDEAREVERN

SEQ ID NO: 26044 - protein, 56 aa, Artificial Sequence
  Synthetic
RELARKLLKRLKELNDRILETLRRLNEETARLVKEVLDTARRLLEELIRVLDETRT

SEQ ID NO: 26045 - protein, 64 aa, Artificial Sequence
  Synthetic
SKEDRLREILTELKEVIDTILRKLEEDARRLKKAHEESNEKLKRIVEDLERVLRELLRKLKERV

SEQ ID NO: 26046 - protein, 56 aa, Artificial Sequence
  Synthetic
KELLDKAKEIVDRVTEEVERILEENERLWRESIKDVKRILDEAREIVRRLLEEVRK

SEQ ID NO: 26047 - protein, 56 aa, Artificial Sequence
  Synthetic
DESEKVKEILERIERSLREVKRRVDEVLKRIKELLEELKRRHDESVKELKRILEEI

SEQ ID NO: 26048 - protein, 60 aa, Artificial Sequence
  Synthetic
GEELAKTLEKLAKELLDANRRLVDTSVKLVKRLLEIVAELVERHKESNRRLLKLIEDRDR

SEQ ID NO: 26049 - protein, 56 aa, Artificial Sequence
  Synthetic
SEEDILRRVVEELERLIKEAKEIIEEIRRLHEELDRKSEELLDRLLELLRDLLRRL

SEQ ID NO: 26050 - protein, 59 aa, Artificial Sequence
  Synthetic
KDKVRRLDELVKELLERLRRLHEENTEEVERVLRESARLLDDLLRKVEEVVEKIKEELR

SEQ ID NO: 26051 - protein, 56 aa, Artificial Sequence
  Synthetic
SREELVKDILRLLTESNDEHKKLSDKLVDLVRKLIELAEKLTEEVVDLVRRLLEEL

SEQ ID NO: 26052 - protein, 59 aa, Artificial Sequence
  Synthetic
EDAKELLKKVKEIVDELVRRHKKLVDEVREVVERVVREHRELVKKDRRLVDEVLKRLRT

SEQ ID NO: 26053 - protein, 56 aa, Artificial Sequence
  Synthetic
SREDLTRETERLLRESNEKHKELTKEIIRLVDRLIKLLEELTERLKELVKELLKRL

SEQ ID NO: 26054 - protein, 59 aa, Artificial Sequence
  Synthetic
EDAKKLVKEVRDVVERVRREHDKLVKEIEKIVRDIEKKLRDLVREDRELVKKIEKKLRD

SEQ ID NO: 26055 - protein, 59 aa, Artificial Sequence
  Synthetic
SAEDLVRRVKDLVDKLEDKLRKVVRTNERLWEEIRKRLEELVRRNKELWDRLVEKLKAG

SEQ ID NO: 26056 - protein, 56 aa, Artificial Sequence
  Synthetic
IRVLVELVRRHNKVLKELVEELEKLVRDHNRVVEEVVRELVELLRRAVEVIKEVVK

SEQ ID NO: 26057 - protein, 62 aa, Artificial Sequence
  Synthetic
REKEVIDDVRRMLEDLLRTIRRVIEENKRIVKESSDHIREVLKRVLEVLRRLLEEVKRLTER

SEQ ID NO: 26058 - protein, 60 aa, Artificial Sequence
  Synthetic
RKDVERELEKIIREVEERLRRVKEKLDDIDRRAKELHEEVMKRLEELVERIRRLLEDVER

SEQ ID NO: 26059 - protein, 62 aa, Artificial Sequence
  Synthetic
SDEEILREILKTLEDVVRRLEELLKENEKLIRESTKLIKDVLDELLEIIKRVAKLIRDLKRN

SEQ ID NO: 26060 - protein, 60 aa, Artificial Sequence
  Synthetic
EETVERKLKKLLDKARTELEKIKRRLDKLNEDYERKLRELEKRLRDLLERLRKTLEDIRK

SEQ ID NO: 26061 - protein, 60 aa, Artificial Sequence
  Synthetic
SEIEKILEELKRLVERVLKLNEDIARRIAELVKKDLKLIEDLLRELEDLVRKILDALRKK

SEQ ID NO: 26062 - protein, 56 aa, Artificial Sequence
  Synthetic
KDKVVEEIRRLLKRLKEEAEKVARESEELLRRIREASKELAERAKDLLRKLDEAVR

SEQ ID NO: 26063 - protein, 62 aa, Artificial Sequence
  Synthetic
SDEERILDTLRRIIEDLLRLLREALRRHEELLRRNIELIRRVLETIKEVLRRLLKLLLEVAK

SEQ ID NO: 26064 - protein, 60 aa, Artificial Sequence
  Synthetic
REELDRLLEDVRRVIEELKKLVREVLERSERMVKEVRDLWRDLKRRIEEAAERIKDELRR

SEQ ID NO: 26065 - protein, 61 aa, Artificial Sequence
  Synthetic
SERELLEKVRKVAEENIRILEEVLRKIAEVVKEDLKLLKELLEATERVVEELLKRIVEKKK

SEQ ID NO: 26066 - protein, 55 aa, Artificial Sequence
  Synthetic
ETLERLLEELERLVKEVVERSERLLKKLLEDVRRVAEELVKSVEDLLKDIEREVT

SEQ ID NO: 26067 - protein, 59 aa, Artificial Sequence
  Synthetic
REKELVDDIRRILEEILRLLRRLLEEVIRLLEENEKLVRRHLKTVIDILRRVAKLLDEN

SEQ ID NO: 26068 - protein, 56 aa, Artificial Sequence
  Synthetic
DSLVREVEELIKRLEKHIDDLLKTSRDLVKRVLDLVDEVVKRVEDLVERVKEKIDT

SEQ ID NO: 26069 - protein, 62 aa, Artificial Sequence
  Synthetic
DEERLAEELERVLDRNRKLLEEALRELRRVIEENRKSVKRLLDELKRVLDELLKVLRELSRD

SEQ ID NO: 26070 - protein, 56 aa, Artificial Sequence
  Synthetic
EEDVERAVKEIRDRLRKLLEDYERAVRRLEDKLRRVRERYEKVLKRIKDKLEETKR

SEQ ID NO: 26071 - protein, 62 aa, Artificial Sequence
  Synthetic
SREEVLRELEEVIEDNRRLLEELIEKSKKVLDESLKLIDELLRRLEEVLERVLRLLEELSKL

SEQ ID NO: 26072 - protein, 56 aa, Artificial Sequence
  Synthetic
EDDLKRVVDEVEKKLRELKRRYKEALERIKEKIKELKDRYERAVREVVAELRKTTK

SEQ ID NO: 26073 - protein, 56 aa, Artificial Sequence
  Synthetic
KKDEEIREKLDRLLEENRRALEEITTRLDDLLRRNKDALRKVMEKLKRLLDDLRRA

SEQ ID NO: 26074 - protein, 55 aa, Artificial Sequence
  Synthetic
ERVKEILERILRVVEEAVRLNEESLRRILDVVRKAVKLDRESLKKILDVVEEAVR

SEQ ID NO: 26075 - protein, 61 aa, Artificial Sequence
  Synthetic
SRVEELKKLIEDILRISREVVERIKRVAEDIHRINRRVLDDLRKLIEDILRTVEEILARKV

SEQ ID NO: 26076 - protein, 55 aa, Artificial Sequence
  Synthetic
DEVEREIRRVKEDLDRILEEYRRLLEEIKRKLEEILRRVEELHRRLRRKLEEIDR

SEQ ID NO: 26077 - protein, 60 aa, Artificial Sequence
  Synthetic
SRVEKVLELLKRIIEILRELVKVHLDVLRHNDELLKRIVEDLKRLVKKLVDILKEIVEKR

SEQ ID NO: 26078 - protein, 55 aa, Artificial Sequence
  Synthetic
EEALERLKRLLEEIRERLEELKKRLEESLKRHEEEVRKLLDKLRRLLRRAEEEAR

SEQ ID NO: 26079 - protein, 58 aa, Artificial Sequence
  Synthetic
SKEDELRKVLETLERLARELEELNKKILDDLKKLIEELRRHTEEVMRRLKELADELRK

SEQ ID NO: 26080 - protein, 54 aa, Artificial Sequence
  Synthetic
EVVRVLEELLRLVRDNVRRLDEILKELLRLVEESVRTAEEILKELLRLIKELAR

SEQ ID NO: 26081 - protein, 59 aa, Artificial Sequence
  Synthetic
SIEELVDELLKVLKEVVEETAKLLEENNRRLKKITDDVRRLNEDTIRRLREVVKELETK

SEQ ID NO: 26082 - protein, 56 aa, Artificial Sequence
  Synthetic
DDKARKALEDLERELRDVDRRSDEEATRLHEEHKKALDRYVKELKRVLDKMKEDTR

SEQ ID NO: 26083 - protein, 59 aa, Artificial Sequence
  Synthetic
SEKELVDKLIKLLEDVVKKLEDIARDNNRILKEIADRVKELNERTVEEIKRVIEELRRK

SEQ ID NO: 26084 - protein, 56 aa, Artificial Sequence
  Synthetic
EEKLTRAAEDLLRKLRRVDEESDKKLREVHRKHKEALEEVKRRLKEITEEADRATR

SEQ ID NO: 26085 - protein, 62 aa, Artificial Sequence
  Synthetic
SESELIRELEKLVKEIVDELERLLRNNIRLLEEVAKTLIRLLENNIELLDEILRELERLSKE

SEQ ID NO: 26086 - protein, 56 aa, Artificial Sequence
  Synthetic
EEEVRRTIERLKEEHEDALRRLKEILEELKDEHRRVLKRVKDKLRELKRRLEEREK

SEQ ID NO: 26087 - protein, 57 aa, Artificial Sequence
  Synthetic
SEREELERLLKELEDVTREVVERLKKLLRDNEKLTDEVRKRLRDLLRRLEEMVRRRG

SEQ ID NO: 26088 - protein, 56 aa, Artificial Sequence
  Synthetic
EEEIEEIVKRLVEVLEKVLRELERASRKLVKVVEEVLRALEEISKELVDVVREVLR

SEQ ID NO: 26089 - protein, 60 aa, Artificial Sequence
  Synthetic
DEDRRLEDAVRKLRKEHKDIMKKLDDIMRELDEDHRRIKERLDRILEELKKLLTRVLRET

SEQ ID NO: 26090 - protein, 54 aa, Artificial Sequence
  Synthetic
EIERIIRRVIEVIREILDLVRKVNKKALRVIEEILEDLARVNKKAVDAIDELRK

SEQ ID NO: 26091 - protein, 58 aa, Artificial Sequence
  Synthetic
DEERLLKTILDVIRKVLKESKDILRRVEEILRRVIETAKEIHKEVKEIIEDVLRLLRE

SEQ ID NO: 26092 - protein, 60 aa, Artificial Sequence
  Synthetic
EEEIEKRVREIKKEVEDLLRRSEELLKELLDRIRKLLEELKKRHEDLLREVKKDLDEIRR

SEQ ID NO: 26093 - protein, 61 aa, Artificial Sequence
  Synthetic
DEVEELLKRVRELLKRSEELVRKILEDVKRLLERSIEEVEDLLRKVEELLKRLLDLVERRK

SEQ ID NO: 26094 - protein, 56 aa, Artificial Sequence
  Synthetic
EDLDRDVDRVLKEIMDLLRDLVRRTKELLEELLRLLEELVRRHKELVRKILDEIRK

SEQ ID NO: 26095 - protein, 59 aa, Artificial Sequence
  Synthetic
REAEELLRELEELLKKSEKVLEDLLRKNRELIKDSKRRLDEVRRKVEKLAEEVEEVIRR

SEQ ID NO: 26096 - protein, 56 aa, Artificial Sequence
  Synthetic
KDAVRKLIEELKKLLEDLVEHHERLLKEDHERLKRLLDHHRELLKTVLTILRETAK

SEQ ID NO: 26097 - protein, 59 aa, Artificial Sequence
  Synthetic
ELDEILRKVVEDSRRLVKELEDILREVIERTERILEEHRDLTRKADEDIRRILEEATRT

SEQ ID NO: 26098 - protein, 57 aa, Artificial Sequence
  Synthetic
KEEVLKDIVRVLRDVLKKANDLLKTHLDLNRESVKKVVEIARRHVKMNEDSVRKVEK

SEQ ID NO: 26099 - protein, 59 aa, Artificial Sequence
  Synthetic
DVEDVLREVVERSRRLVEEHKRISEKVIRDTKRILDEHRELTERVIRRAKKLVDDARRT

SEQ ID NO: 26100 - protein, 57 aa, Artificial Sequence
  Synthetic
KEEVLKDAVRVLEEILRKLNELLERHLKLNEESLERMNRILTRHVKLNKESADDARR

SEQ ID NO: 26101 - protein, 59 aa, Artificial Sequence
  Synthetic
DEEELLRRVTEELKRLLDEARKLHEDVKRELEKLLKENDDLLRDVKRKLERLLEALKRG

SEQ ID NO: 26102 - protein, 57 aa, Artificial Sequence
  Synthetic
KDKLLERIRRLLETLLEVLKRDNEEIKRILEELLRVAEENLRRIKEIIDRLLDATRR

SEQ ID NO: 26103 - protein, 59 aa, Artificial Sequence
  Synthetic
DEEEVVKRLADVLRENDETIRKVVEDLVRIAEENDRLWKKLVEDIAEILRRIVELLRRG

SEQ ID NO: 26104 - protein, 59 aa, Artificial Sequence
  Synthetic
EDVKRALEELVKRLRKLLEDVKKKSEDIVREVERIVRELKKRSDEILKKLEDIVEKLRE

SEQ ID NO: 26105 - protein, 56 aa, Artificial Sequence
  Synthetic
KEREEIRERVKRILETSRKLLEELAKAVEDVLRRSKELIDELRDAVRRVLEELERG

SEQ ID NO: 26106 - protein, 59 aa, Artificial Sequence
  Synthetic
DRTKKIVERIIELIEELLRLLVKVVEDSVRLIEELLKLAEEVAKRSLKLIEDLLRAIEK

SEQ ID NO: 26107 - protein, 58 aa, Artificial Sequence
  Synthetic
SDDEVIEKVKEDLRRLIKEAEDVVREYEKRLREVEKKLDEVVKESERLLRELLKKLEA

SEQ ID NO: 26108 - protein, 60 aa, Artificial Sequence
  Synthetic
KKELIKILRDLARKHRELLKRLKELTREHLKRVREILEELLRVTRELVEEIDKILKDLKK

SEQ ID NO: 26109 - protein, 58 aa, Artificial Sequence
  Synthetic
SEDEVLERIRRALERVEDEHRKVLEKIVEDLKDVLEKHKRVLEEAKRDLERIKEDADK

SEQ ID NO: 26110 - protein, 60 aa, Artificial Sequence
  Synthetic
EKSLKDLLREVLERSKKLLEEHHKHLEEIVRRTKELLERHHRHLKEIIRRIEEILKRERD

SEQ ID NO: 26111 - protein, 59 aa, Artificial Sequence
  Synthetic
SKEDELREVLERVKRLIETVKRALDEALDRTRRLIEELDKTSKRVLTTVKKLIEDARRE

SEQ ID NO: 26112 - protein, 57 aa, Artificial Sequence
  Synthetic
ERDLLRELLRIVKEHVDEVRKLLDELRKVNEKIVDAVRKILEKLLKIATDAIEETRK

SEQ ID NO: 26113 - protein, 61 aa, Artificial Sequence
  Synthetic
SEKERLMEEIKRVAEELRKTVDRLRERNEKVVRDIRETVREVEREHEDVVKELADRVRELR

SEQ ID NO: 26114 - protein, 62 aa, Artificial Sequence
  Synthetic
EEVREVLRRLTKILRDLLKRNKEIMEKLLRDLKELLKENKKALEDLLRKLEELLRRIAEAEK

SEQ ID NO: 26115 - protein, 57 aa, Artificial Sequence
  Synthetic
SKEETTKRLLDRHLERDRELLDRAARTNEEILRRNREVLKELFELLKRILDRVREAN

SEQ ID NO: 26116 - protein, 59 aa, Artificial Sequence
  Synthetic
EEVLRELRELLKRLKKRLEELLREHEKLLEDYKDRLRKSDDDLRRSVEEIKKALDRLRK

SEQ ID NO: 26117 - protein, 57 aa, Artificial Sequence
  Synthetic
SKLEDSAEKLKEHLKRDRELLKRAEDLLREILRRNREVLDELRRTLDDILRRIREEN

SEQ ID NO: 26118 - protein, 59 aa, Artificial Sequence
  Synthetic
KEVLDRLEKLLRDARKRLKELLDEHEKVLEDMERRLRESLDDLRRSLDRIRKDLKRKTD

SEQ ID NO: 26119 - protein, 62 aa, Artificial Sequence
  Synthetic
SEKERTKELLERLLKLIRELLKKLEDLNRDLLRRVKEVLDRLAELNEELLRRVEEVTRLRDE

SEQ ID NO: 26120 - protein, 60 aa, Artificial Sequence
  Synthetic
KEKLTKLIKEIKERSKRLLEEVKRALEEVMKKNEKILRDVRDDLRRAREELREILREADD

SEQ ID NO: 26121 - protein, 60 aa, Artificial Sequence
  Synthetic
REEEKLKETLERILRELEKLAKENKELLERILKRDEDLTRENKETLDRLLKRVEEVTRRK

SEQ ID NO: 26122 - protein, 60 aa, Artificial Sequence
  Synthetic
DREVEKVLRDIKRKIKEIVDEHRDMNRKIKEEIDRIDTEYKKSLKDIKKEIEEVLDEARQ

SEQ ID NO: 26123 - protein, 59 aa, Artificial Sequence
  Synthetic
RKEEAIERIRREIEKVRRRLREVHKESEERIRRLEDEYRRALETSAELIRRILDELRKN

SEQ ID NO: 26124 - protein, 59 aa, Artificial Sequence
  Synthetic
KRVKDIVRKILRVIEENLKFVAEAVKKLKEIIERNLRLLEEIAKLLLDILEEVLKRLTT

SEQ ID NO: 26125 - protein, 59 aa, Artificial Sequence
  Synthetic
REKEVIEDIKRLLDEILKRLEEANKETEERLEKLRKEYRELLEDSKRKIKDIEAELRRL

SEQ ID NO: 26126 - protein, 59 aa, Artificial Sequence
  Synthetic
EAVKEIVKRLKEVIKDNLRVVEELVRKLKEIIEDNLRVLREIAKLLKDVLEKLLRDVRK

SEQ ID NO: 26127 - protein, 56 aa, Artificial Sequence
  Synthetic
DKDKRLEELLKRLKELNDKTFEELERILEELKRANERSLREAERILEELRRRIEER

SEQ ID NO: 26128 - protein, 59 aa, Artificial Sequence
  Synthetic
KDVKDIIRTILEVARDLLRLLEEDSRTNSEVVKRLLDLLREDSKANSEVVKRLLDVLRE

SEQ ID NO: 26129 - protein, 56 aa, Artificial Sequence
  Synthetic
SKEETLKRLLDELEKRNRETVERLERLLKELEDRNRRSLEELERVLEELERKIEES

SEQ ID NO: 26130 - protein, 59 aa, Artificial Sequence
  Synthetic
REVKDIVRKMEEVIRRLIEILRRDVELNLDVAKKLLELLKEDSKLNLDVARELLELLDR

SEQ ID NO: 26131 - protein, 57 aa, Artificial Sequence
  Synthetic
RELELLDELLRRTERLVKEYLRVSKELLEETLKLLTELLKLSKRLLEETERLLRRDK

SEQ ID NO: 26132 - protein, 60 aa, Artificial Sequence
  Synthetic
KTELLEEAVKRLETLLRRYKEEIRRVAKRLEELLRELNELSKRLEETLKKLLEDLREDAR

SEQ ID NO: 26133 - protein, 57 aa, Artificial Sequence
  Synthetic
DEEETLRRLLERKVELAKEYLDVSKEVIDRTTKLLDEYLKTSKRIVDKTVELLERDD

SEQ ID NO: 26134 - protein, 60 aa, Artificial Sequence
  Synthetic
LRERLEEARRRLEELLRELNEITKDLERKLEKLLRDLNELTKRLEEELKRLLDELKKRTD

SEQ ID NO: 26135 - protein, 61 aa, Artificial Sequence
  Synthetic
SEEDELVKRLRELVKELIDAIREHLRRLEELLRELLKALEDHLRKLAELVRRIIEELRRTN

SEQ ID NO: 26136 - protein, 59 aa, Artificial Sequence
  Synthetic
EELKERIRRIVETIRRSLERLKEEADRIVKEIEKSLRELEERLERIVDTIRKLLEDAKR

SEQ ID NO: 26137 - protein, 61 aa, Artificial Sequence
  Synthetic
SEDDVLRKLLEAIKKLLKETKEILDRYLRESDRHNKALREILERLLELIKTLLEDLVRRTG

SEQ ID NO: 26138 - protein, 59 aa, Artificial Sequence
  Synthetic
EEALKEIKRKLRELEKEIRKVVEDSRRISEESLRRLEKALEDIERILKKLSDEIRTDAT

SEQ ID NO: 26139 - protein, 58 aa, Artificial Sequence
  Synthetic
DEEEVTKEVERLNRELLKRLREIVEETKDLNRRLLEILEELVRRTEKLLKDVLEIRKR

SEQ ID NO: 26140 - protein, 56 aa, Artificial Sequence
  Synthetic
KDRLREELKKLLEELRRVLEDAKRKSEELSRRLEEVLRRAEEKNKEIMDRIRKARE

SEQ ID NO: 26141 - protein, 57 aa, Artificial Sequence
  Synthetic
KEKEELLEEVERKVTELKKRSEDLVRKLDEEVKRLEREHEELLKKLRDAVEELRRAK

SEQ ID NO: 26142 - protein, 60 aa, Artificial Sequence
  Synthetic
RETVLRKIIRLVEELLKILARINEEVKKLIRKLLEILTRINKKMIEVIDELVKIIREAAT

SEQ ID NO: 26143 - protein, 56 aa, Artificial Sequence
  Synthetic
SEEERTKESLKKVLKALVDLNRELLRKLEENMRELTKLNEEVKRKLKEVLDKVREN

SEQ ID NO: 26144 - protein, 59 aa, Artificial Sequence
  Synthetic
EEIRKIVEEILKEIKELADRYREEVRKSKDKLRRILEDYKRKVDELKERLRELIEEVET

SEQ ID NO: 26145 - protein, 59 aa, Artificial Sequence
  Synthetic
SLKELAEEVLRRILELLRRIIEIHERSLERSNRTLKKLIDEIERVMREILETLKRALSI

SEQ ID NO: 26146 - protein, 56 aa, Artificial Sequence
  Synthetic
RTLLEEIRRRVEKVIREARETLREHRERVERSIEELRRMLEDVERIVREAIERLRR

SEQ ID NO: 26147 - protein, 61 aa, Artificial Sequence
  Synthetic
SEVEDILRRLAELNKRLIDKLRELIDRIRRLNEELLRVVEDILRRLKRLADELIRVVRERG

SEQ ID NO: 26148 - protein, 56 aa, Artificial Sequence
  Synthetic
DEDLKRLLEKLKEDVERVLKEVRDRTRESLKHLEDVIRELEKKTEDSLRHMEERRK

SEQ ID NO: 26149 - protein, 57 aa, Artificial Sequence
  Synthetic
SKEELVKEALEENVRSVEEVIKLLKDALDENLKVVERVIRELKRALERVKDVIRKLI

SEQ ID NO: 26150 - protein, 59 aa, Artificial Sequence
  Synthetic
KKVADELKKLLDELKKILEEIRRMLEEANRKHDDIVRDIRRVLEENDRKLEKIADDIRR

SEQ ID NO: 26151 - protein, 57 aa, Artificial Sequence
  Synthetic
SKKEELEKLLDTNLTEIRRLLKRVKDVLDRNLEVVRRVIEELARLLDEVTEVVRRLI

SEQ ID NO: 26152 - protein, 59 aa, Artificial Sequence
  Synthetic
EKVKRELEKLIKRVKDILDDIRRRLKKVNEEHEREADRLRRELERLDRELKKRMDDIRR

SEQ ID NO: 26153 - protein, 56 aa, Artificial Sequence
  Synthetic
DEDEELKERTKKSLEKLRRLLERLEKIIRESLDKLRDLLRLLEEALKRILDELRRN

SEQ ID NO: 26154 - protein, 56 aa, Artificial Sequence
  Synthetic
RDKLEKIERDIRKIIRDLEEIARRLKEDHERVIKELRETVKKHKEDLEEVIRELRR

SEQ ID NO: 26155 - protein, 55 aa, Artificial Sequence
  Synthetic
REKEDVARRIKRIHDELETRIRKLARDLERIHRKLKEDIERLVREAEKKLRELEK

SEQ ID NO: 26156 - protein, 55 aa, Artificial Sequence
  Synthetic
EEIERLVEELKKILETILKLIAELNEEVVRLLEDILRLVRELNERVAELLERAEK

SEQ ID NO: 26157 - protein, 60 aa, Artificial Sequence
  Synthetic
DEERIIKTLEDINKKLVEDIKRILDKVRELNERLADAIRKILEETKRILERTTRKVRKDG

SEQ ID NO: 26158 - protein, 56 aa, Artificial Sequence
  Synthetic
KDTLRTVEKLVEDVKRRLDKLLEDYKRLIEEVKKELDKLLKEYEDRLREIKKRIDE

SEQ ID NO: 26159 - protein, 59 aa, Artificial Sequence
  Synthetic
DLEDAIRELLRRLTELIEELVRILEELNKRLNDLVRRLVEILRRINELLKKLVDRLRKD

SEQ ID NO: 26160 - protein, 59 aa, Artificial Sequence
  Synthetic
ERELKKVLDDIREKVKKTIKEIDEVLEKITRENERTRKEIEEMLRTLRELIKRLLEETK

SEQ ID NO: 26161 - protein, 56 aa, Artificial Sequence
  Synthetic
SEEDEVAKTLEDILRRLEELLREHHELHRRILEELEKLLRDHIKLHKDILDEATKS

SEQ ID NO: 26162 - protein, 56 aa, Artificial Sequence
  Synthetic
KETLKRLKDRSKELNDRVRETLKRLAERSKRLNEKVEEDVRRAVEELRRLLEEIRK

SEQ ID NO: 26163 - protein, 56 aa, Artificial Sequence
  Synthetic
DERKVIEDLVEVLRDLLRVIKEVLDRNVKLIKDLLRLNLKVAEELIRVLKELLDRL

SEQ ID NO: 26164 - protein, 55 aa, Artificial Sequence
  Synthetic
EELDRIRKELKRLLDELTKLHEDVRKKSEELVREAERTLEDVKRKLDELLERAKK

SEQ ID NO: 26165 - protein, 60 aa, Artificial Sequence
  Synthetic
DEERELERLLEDVRRRHEELLRRLEKLLEDIRKLYEDVRRKLKRLLERVDRLVREILRRD

SEQ ID NO: 26166 - protein, 58 aa, Artificial Sequence
  Synthetic
ELIKELADIVKEILRLAEELAKELEKINRELDRVTRELIKDLLRISRELIKRLEDTTR

SEQ ID NO: 26167 - protein, 58 aa, Artificial Sequence
  Synthetic
SDKELLDDTIRKMRKLHRDSVELLDDIRRKLEELLRKVRELLDRNVKKIRELIELRKK

SEQ ID NO: 26168 - protein, 56 aa, Artificial Sequence
  Synthetic
DSDLEDLIRRDIEELKKVIEKLEELVRRIEELLREAKERDKESLDRIEDELRKAKK

SEQ ID NO: 26169 - protein, 58 aa, Artificial Sequence
  Synthetic
EEDDLLKANLDTLRELHKESEKLLRDIEETAKELHKKSEELLKRITDELDRLVKLSRK

SEQ ID NO: 26170 - protein, 56 aa, Artificial Sequence
  Synthetic
DSDIKRILDDLRRRLEDALRRDRETLKRLKEEIERVKKEDRRSLERDKEELEKARK

SEQ ID NO: 26171 - protein, 56 aa, Artificial Sequence
  Synthetic
SAAELILKAAKEAAEANREAAELALKAAEESARAAREAAELALKAAKEAAEAARRG

SEQ ID NO: 26172 - protein, 56 aa, Artificial Sequence
  Synthetic
KDDLTRAADELLKKAKKLADDYKRAADRLLKEAEDLAREWKKLADKALEDAKRDAD

SEQ ID NO: 26173 - protein, 56 aa, Artificial Sequence
  Synthetic
KAEEAAKEAARLAKEDADLAKKAAEDAAELHERHAKLLEDSARTAAELAKRLAEAA

SEQ ID NO: 26174 - protein, 59 aa, Artificial Sequence
  Synthetic
KEDLDRLAKIAKEAADALEELLERSKESAERAARALEKLLKEWADSAKKAADALEELDR

SEQ ID NO: 26175 - protein, 60 aa, Artificial Sequence
  Synthetic
DELETLKKEAEDVLRELRDILRKLEDLSRKTIEDMRRIVEEVLKLNEDSIRELKRIIEEL

SEQ ID NO: 26176 - protein, 55 aa, Artificial Sequence
  Synthetic
DEVVKKLEDVSRKSIDDLRKIIETLREVVERSIEEIERIIRDLERVIREIIEREK

SEQ ID NO: 26177 - protein, 57 aa, Artificial Sequence
  Synthetic
SKIEELAKIAEEHAELNRRAARKNNEIAKEAAELWKRAAEKHVRIAERAADAIRKAA

SEQ ID NO: 26178 - protein, 59 aa, Artificial Sequence
  Synthetic
EKALREAKELAERAARENREALKEAKELAKRNSEKAKESAKEHKKLAEDANKRAEEATR

SEQ ID NO: 26179 - protein, 59 aa, Artificial Sequence
  Synthetic
DEEEVIEEILKTLEEINRRVLKLIKDILEKVKRVDDEIKTLVKEVLRENERVLREVREK

SEQ ID NO: 26180 - protein, 59 aa, Artificial Sequence
  Synthetic
EKMLEDILRRLEEINRTSLRLVDEVSKKTREVLERILKLVKEVLDESRRVAKKVKDDLK

SEQ ID NO: 26181 - protein, 57 aa, Artificial Sequence
  Synthetic
SAVDIAREAARRVIELLKRSAEAAEEAARRSIKLAKESADAAREAAKKVIEILKRAA

SEQ ID NO: 26182 - protein, 56 aa, Artificial Sequence
  Synthetic
EDAARKAAEIAARAAKRSADTAKRWAEVAKEAAEESAKSAKKAAKIAEDAAREIEK

SEQ ID NO: 26183 - protein, 57 aa, Artificial Sequence
  Synthetic
DLREAAKEAIDAAEEAARRTEEAAKENIRALEEAAKRTRDAVRRAIKAIEDAVRDAG

SEQ ID NO: 26184 - protein, 56 aa, Artificial Sequence
  Synthetic
REDLERIAREAAERAKELADRLEEIYRRAAEESKRLAEELKRIYKRAAEEAKKAAD

SEQ ID NO: 26185 - protein, 57 aa, Artificial Sequence
  Synthetic
SKIEELMKLVEKIIRKTLDLVRKHAEVSKEVLKEYIRISKEHLDVSKRVAEELKKEI

SEQ ID NO: 26186 - protein, 59 aa, Artificial Sequence
  Synthetic
KEDLDRIRDTLRRVIERSKRIHDRLREMLEEVKRRSEEIVERIERELRDVARKLEETLR

SEQ ID NO: 26187 - protein, 59 aa, Artificial Sequence
  Synthetic
SLTEELRRVVKEIEEVVRRDVRTLEEVVKKITEVVRRDDKSLREVVKRNEELVRLLARG

SEQ ID NO: 26188 - protein, 60 aa, Artificial Sequence
  Synthetic
EKDRREILRELVELTERSVEEIARVNKELVDIVRELVKELKRLNERLVELVKRLVEETAT

SEQ ID NO: 26189 - protein, 56 aa, Artificial Sequence
  Synthetic
RAIETLVDVVREAIEINKRLVDRNVESNKELAKLNRDLVRRNRESNTELADLVRRD

SEQ ID NO: 26190 - protein, 60 aa, Artificial Sequence
  Synthetic
EEELKRVVDEIVELLKRVLETTEKVVRDNVRLLEKALRSSKKVLDENVKKLEDVLRDLKR

SEQ ID NO: 26191 - protein, 56 aa, Artificial Sequence
  Synthetic
SAAEALAKLAKENAELNRELAERNARSNKELAELNEEAARRNAKSNKELAELARRE

SEQ ID NO: 26192 - protein, 60 aa, Artificial Sequence
  Synthetic
EEELKRAIEEAAKLLKRAADETRRAAKENAEALEKAARESKEAAKDNAEALKKAAEEAKK

SEQ ID NO: 26193 - protein, 58 aa, Artificial Sequence
  Synthetic
TEEEVVEDVKRVLDESHDDLRRLIETLTRVLRESLKRIKEALEELERVLKKLLDLLEG

SEQ ID NO: 26194 - protein, 56 aa, Artificial Sequence
  Synthetic
REEVKRVLEEARDELRRLLEEYKKIIEELERELERLLREHREVIRRIKEEIDKSSK

SEQ ID NO: 26195 - protein, 59 aa, Artificial Sequence
  Synthetic
SEVERAVEDVKRALEENVRLSKELVDRVTKMAEDNVKLTKDIVDKVRRILEELVEVIER

SEQ ID NO: 26196 - protein, 56 aa, Artificial Sequence
  Synthetic
KDEVRKIVRELVEEAKKVVEYDTENAKRVVEELKRVVKRDADVVRKLVELLDRKAR

SEQ ID NO: 26197 - protein, 59 aa, Artificial Sequence
  Synthetic
SELEEAVKRVRDALRENLDSIRRLVEKIRRVLEEHNKLSKELVDRIEEVLRRTVEAVKK

SEQ ID NO: 26198 - protein, 56 aa, Artificial Sequence
  Synthetic
KRDVARVVRELIELVKRVLERDKRIVDELVKLVDEVLKRNKEIVDELVRLVDEARR

SEQ ID NO: 26199 - protein, 56 aa, Artificial Sequence
  Synthetic
SELEDLIRLLREVIKRLEESVKELVDIVEEAIERLRKIVKELIDLSRKVIDELLEL

SEQ ID NO: 26200 - protein, 59 aa, Artificial Sequence
  Synthetic
EELLDRIRRLIEESIKKLARIADRLRKLIEDLRRLLEELLRRNEELIERLERMLDEKAR

SEQ ID NO: 26201 - protein, 60 aa, Artificial Sequence
  Synthetic
SEKEEAAKAAEEAAEIAERADEKAARSSKEAAKIAEKADKEAAESTRKALDDARRALEEA

SEQ ID NO: 26202 - protein, 59 aa, Artificial Sequence
  Synthetic
EDAARRAEKAARENADSIRRAAEKSRKAAEDNARSIEKAARESEEAAERAARILKRAKD

SEQ ID NO: 26203 - protein, 57 aa, Artificial Sequence
  Synthetic
KEVEDVVEKLRELIDRALDRNRKVVEEVRDVVRRALEENRKVVEEVRKVIKEILDRV

SEQ ID NO: 26204 - protein, 55 aa, Artificial Sequence
  Synthetic
KEATDLIRELIERLRKVLEKSRRLIDRLVKLSRDVLEETKRLVEELIREVKRAET

SEQ ID NO: 26205 - protein, 60 aa, Artificial Sequence
  Synthetic
KLEEIVKKLEDLNKKAVEILRRVLEEHEKLVEKVKKVLRDVLRLLEKVVREVIETLKKKD

SEQ ID NO: 26206 - protein, 56 aa, Artificial Sequence
  Synthetic
EEVLRKLKEIIKELKDRLKKLLDDYERIIDELRRELERVLREYEKILEDLRKELED

SEQ ID NO: 26207 - protein, 60 aa, Artificial Sequence
  Synthetic
SELEEAAKALERIAKKAAKAARDWAEEDRRLAEEAIRAAEEWAKENKKLADELAKAAKDN

SEQ ID NO: 26208 - protein, 56 aa, Artificial Sequence
  Synthetic
SDEAVRALEEAAKRSEDAARKAAKLARDAAEKSRRAAEKAIRLLEEAAKEAKDAAR

SEQ ID NO: 26209 - protein, 57 aa, Artificial Sequence
  Synthetic
KEAEEIAEAVKRLAEASAKTAEELARAVRKAAEDLVKLAKEHADALRTAADRIAKLI

SEQ ID NO: 26210 - protein, 59 aa, Artificial Sequence
  Synthetic
EDIRREIKRIADELKEITKRLEDEVEKIIRRLEKIAKEAEDRHRKLAEELRRIAEEAKR

SEQ ID NO: 26211 - protein, 59 aa, Artificial Sequence
  Synthetic
SVDEALEELVRRLLEVLKTVLERTKELSRDDLRVVKEVLRIIEELVKRLLKVIRDGLDD

SEQ ID NO: 26212 - protein, 59 aa, Artificial Sequence
  Synthetic
EDVRRDIERLLEELKRRVERLLEDIERLLRELEKLNEDVLRENKKLLEDLERRVRERKK

SEQ ID NO: 26213 - protein, 60 aa, Artificial Sequence
  Synthetic
DEERIVREIVKIIEEAVKELVRLVREDIELVKDVVRRHNRLNEEIVKLWKELVDEVLKSR

SEQ ID NO: 26214 - protein, 56 aa, Artificial Sequence
  Synthetic
KDLLRRAEEEIRRLLKENEDILKRVEEEVKKSNEELRRILDRVRRELEKALKRLRD

SEQ ID NO: 26215 - protein, 60 aa, Artificial Sequence
  Synthetic
SKEEEVKRLIDELKRVNERVNKTIKELVKLLEESHEEVLKEIERLIREVLRVIKEVIEAV

SEQ ID NO: 26216 - protein, 59 aa, Artificial Sequence
  Synthetic
KEALDKLVDAARRVLEAVRDVLRKDERSVERVLDEVRRVAEELERTHREVVKRVEDAAR

SEQ ID NO: 26217 - protein, 60 aa, Artificial Sequence
  Synthetic
DKEKTVADLIEKVERSHERVLKRLAELIEELKRVNERVNREIERLIRELEEVIDRVIKAV

SEQ ID NO: 26218 - protein, 59 aa, Artificial Sequence
  Synthetic
REMLEELVRVARRVLEAIKTVADELRKRHEEVSREIERVAEEDKRTVEEVLKRIEDAAR

SEQ ID NO: 26219 - protein, 60 aa, Artificial Sequence
  Synthetic
KDEEIIKRLEDLLKENVDRLREILERVERTHRKVIEELKRILEELEEILRRVIEKLRRKN

SEQ ID NO: 26220 - protein, 55 aa, Artificial Sequence
  Synthetic
RDVERLLKELKRIVEEILRLVRELVTRDIDALRRLLESVRRLVDKLIRIVEERRR

SEQ ID NO: 26221 - protein, 60 aa, Artificial Sequence
  Synthetic
SDKDRLLEEIKRLIDESRRKAEEILKRSTELLEDSKRDLREILRRSEKILDELLDLIRRN

SEQ ID NO: 26222 - protein, 60 aa, Artificial Sequence
  Synthetic
SKEIKDALRRVLEKHKKVLREAIKKHEESLEEHRKVLEEIIELHKRSLKKLEDVIDTVRK

SEQ ID NO: 26223 - protein, 60 aa, Artificial Sequence
  Synthetic
SKEELIKELKETVKRIIKLLEELSKKMEEIIKRIAELLRELSKKLVDIIKRIIELLRREG

SEQ ID NO: 26224 - protein, 55 aa, Artificial Sequence
  Synthetic
EEILKEIKRLLDESKERLDRVLREIEELLRRYEEEVRRVLEEIKKILDELRERIR

SEQ ID NO: 26225 - protein, 56 aa, Artificial Sequence
  Synthetic
DTERAADEARRRLEKLARDHKEKLKKAAEDLRRLLEEAERAHRKIEKELEELTRKV

SEQ ID NO: 26226 - protein, 57 aa, Artificial Sequence
  Synthetic
AERALKEAADRAREALRRNLRALREAVREAEEAIEKDARAIDEALKKAREAIEEAER

SEQ ID NO: 26227 - protein, 56 aa, Artificial Sequence
  Synthetic
SKVEELAERAARSHKELADAIRELAREAAESHKEAAEVVKRLADEAARAAKEVAKA

SEQ ID NO: 26228 - protein, 56 aa, Artificial Sequence
  Synthetic
RKVLEDAKKILEDLRKKAEDALRKHKKILDELEEKAKKAAEKHERILRKLDEDAKR

SEQ ID NO: 26229 - protein, 59 aa, Artificial Sequence
  Synthetic
SEDEEVLKDIKRLLEEVKKTLEEVAKRHEKALREIEERVKEIVKEHEDLLKEVEDKARS

SEQ ID NO: 26230 - protein, 60 aa, Artificial Sequence
  Synthetic
KEDLDRLLKEVLDISRKVLEEVLKIIKRVLEISKRVLEEILRRIEKVLRDIDRVLKKLRE

SEQ ID NO: 26231 - protein, 57 aa, Artificial Sequence
  Synthetic
SREEDLARKIAEAVKELLDADRRLLREIEKLAEELLRINEELLRRLEELARELLEAV

SEQ ID NO: 26232 - protein, 56 aa, Artificial Sequence
  Synthetic
ERLLRKLEEILRRLKDESRKVLKKVKEILDRLKRETEEILDKVRKILERLEEEVRR

SEQ ID NO: 26233 - protein, 59 aa, Artificial Sequence
  Synthetic
SAEEAAEEALRRAAEAAKESIKAAREALEEVRKAAEKSIRAAEKALRDVKKAAEEAKSA

SEQ ID NO: 26234 - protein, 57 aa, Artificial Sequence
  Synthetic
IEEAAKKAIDLARDHARLVKKIAKDLIDLAKEHADLVREIAKRIIEAAKRIAEIVRK

SEQ ID NO: 26235 - protein, 60 aa, Artificial Sequence
  Synthetic
SDEELLEEIKKILDEVLKKNADAVRSLEKVLDKVLEDNARAVEELKTVLDKVLRDLERRG

SEQ ID NO: 26236 - protein, 55 aa, Artificial Sequence
  Synthetic
KDVEEVVKEVRDVLRESVDKVRRVIEEVKRVLDRSSEEVERAVEEVKRVLDKVRK

SEQ ID NO: 26237 - protein, 61 aa, Artificial Sequence
  Synthetic
SDEELLERVERLLRELLDTNRRMLEEVEKELRRLLETNKKTLDDVRRLLKELLDVLETRGV

SEQ ID NO: 26238 - protein, 55 aa, Artificial Sequence
  Synthetic
DDLRELKKRIEDLLKEDKERLEKIARDIERDLERYARDLKRLEDELREDIERARR

SEQ ID NO: 26239 - protein, 61 aa, Artificial Sequence; identical to SEQ ID NO: 26237
  Synthetic

SEQ ID NO: 26240 - protein, 55 aa, Artificial Sequence; identical to SEQ ID NO: 26238
  Synthetic

SEQ ID NO: 26241 - protein, 56 aa, Artificial Sequence
  Synthetic
EEDERLTKRVEEIKRENRELLRRLEEEVKELERKSEKIVRDLKEKVDRAKEKLDSG

SEQ ID NO: 26242 - protein, 57 aa, Artificial Sequence; identical to SEQ ID NO: 25298
  Synthetic

SEQ ID NO: 26243 - protein, 56 aa, Artificial Sequence; identical to SEQ ID NO: 26241
  Synthetic

SEQ ID NO: 26244 - protein, 57 aa, Artificial Sequence; identical to SEQ ID NO: 25298
  Synthetic

SEQ ID NO: 26245 - protein, 58 aa, Artificial Sequence
  Synthetic
TEEEVLRKVEKLIKDLLDVLRDLLRASEEVVREALRVLEELIEENKRVIEELSRALSG

SEQ ID NO: 26246 - protein, 60 aa, Artificial Sequence
  Synthetic
EEKLRRDLTETKKELEKRHEDLRRELEKLLRDYKRELEEIERALEEIEKTLKRRADETRR

SEQ ID NO: 26247 - protein, 58 aa, Artificial Sequence; identical to SEQ ID NO: 26245
  Synthetic

SEQ ID NO: 26248 - protein, 60 aa, Artificial Sequence; identical to SEQ ID NO: 26246
  Synthetic

SEQ ID NO: 26249 - protein, 60 aa, Artificial Sequence
  Synthetic
SAKETIRKLIEENKDIIRKLAEKLKRLLEESERIAEEALRLIKELLERIERALRRVGSGI

SEQ ID NO: 26250 - protein, 55 aa, Artificial Sequence
  Synthetic
KELEKLLEDLEREIRRLAKRLKELSDRLEEKIRKIKRELDDLSARLREKIERTRK

SEQ ID NO: 26251 - protein, 60 aa, Artificial Sequence; identical to SEQ ID NO: 26249
  Synthetic

SEQ ID NO: 26252 - protein, 55 aa, Artificial Sequence; identical to SEQ ID NO: 26250
  Synthetic

SEQ ID NO: 26253 - protein, 59 aa, Artificial Sequence; identical to SEQ ID NO: 25341
  Synthetic

SEQ ID NO: 26254 - protein, 56 aa, Artificial Sequence; identical to SEQ ID NO: 25342
  Synthetic

SEQ ID NO: 26255 - protein, 59 aa, Artificial Sequence; identical to SEQ ID NO: 25341
  Synthetic

SEQ ID NO: 26256 - protein, 56 aa, Artificial Sequence; identical to SEQ ID NO: 25342
  Synthetic

SEQ ID NO: 26257 - protein, 60 aa, Artificial Sequence; identical to SEQ ID NO: 25343
  Synthetic

SEQ ID NO: 26258 - protein, 58 aa, Artificial Sequence
  Synthetic
EEIKRLKEELERRHRRLEEEVERVARELEKAHRDLERDIRRVAEELKKLLKKLRDDRR

SEQ ID NO: 26259 - protein, 60 aa, Artificial Sequence; identical to SEQ ID NO: 25343
  Synthetic

SEQ ID NO: 26260 - protein, 58 aa, Artificial Sequence; identical to SEQ ID NO: 26258
  Synthetic

SEQ ID NO: 26261 - protein, 60 aa, Artificial Sequence
  Synthetic
SAEETVERLLEEARKRHEEIIKKAKELLDRAREEHERIIREAEKLLEEIKKRVDELVRDG

SEQ ID NO: 26262 - protein, 56 aa, Artificial Sequence; identical to SEQ ID NO: 25348
  Synthetic

SEQ ID NO: 26263 - protein, 60 aa, Artificial Sequence; identical to SEQ ID NO: 26261
  Synthetic

SEQ ID NO: 26264 - protein, 56 aa, Artificial Sequence; identical to SEQ ID NO: 25348
  Synthetic

SEQ ID NO: 26265 - protein, 56 aa, Artificial Sequence
  Synthetic
SEKEELKRLLDKLLKELKRLSDELKATIDKILKILKEVSEEVKRTADELLDAIRRG

SEQ ID NO: 26266 - protein, 59 aa, Artificial Sequence
  Synthetic
EDELRKVEEDLKRLEDKLKKLLEDYEKKVRELEETLDDLLRKYEETLRRLEKELEEAER

SEQ ID NO: 26267 - protein, 56 aa, Artificial Sequence; identical to SEQ ID NO: 26265
  Synthetic

SEQ ID NO: 26268 - protein, 59 aa, Artificial Sequence; identical to SEQ ID NO: 26266
  Synthetic

SEQ ID NO: 26269 - protein, 60 aa, Artificial Sequence
  Synthetic
SDAERLVKKIADSLRAYEDLLRKLVERIRDLLRAYEEELRKLLTEIEKTLEDVRDVLRRG

SEQ ID NO: 26270 - protein, 58 aa, Artificial Sequence
  Synthetic
DLLEALRRLVERLKRLIERVLKLNRELVKKLLELLEEALRANRRLVEDILKIADEARK

SEQ ID NO: 26271 - protein, 60 aa, Artificial Sequence; identical to SEQ ID NO: 26269
  Synthetic

SEQ ID NO: 26272 - protein, 58 aa, Artificial Sequence; identical to SEQ ID NO: 26270
  Synthetic

SEQ ID NO: 26273 - protein, 59 aa, Artificial Sequence
  Synthetic
SATERVLDLARDLIRILLEIHKRALKLIAELVSKLLKIHEDVLKLSEELVEELLEIVKR

SEQ ID NO: 26274 - protein, 60 aa, Artificial Sequence
  Synthetic
EDTLRRVLERIREEVERVKEKHRRLLEELKKLLEELRARSADLLEDIKRKVRELEEKTRR

SEQ ID NO: 26275 - protein, 59 aa, Artificial Sequence; identical to SEQ ID NO: 26273
  Synthetic

SEQ ID NO: 26276 - protein, 60 aa, Artificial Sequence; identical to SEQ ID NO: 26274
  Synthetic

SEQ ID NO: 26277 - protein, 56 aa, Artificial Sequence; identical to SEQ ID NO: 25371
  Synthetic

SEQ ID NO: 26278 - protein, 60 aa, Artificial Sequence
  Synthetic
RERLARLLKALADKLIRVLEEILKINEELNRKIIKFARENLERNRRVNKKVIEVLREAAR

SEQ ID NO: 26279 - protein, 56 aa, Artificial Sequence; identical to SEQ ID NO: 25371
  Synthetic

SEQ ID NO: 26280 - protein, 60 aa, Artificial Sequence; identical to SEQ ID NO: 26278
  Synthetic

SEQ ID NO: 26281 - protein, 61 aa, Artificial Sequence
  Synthetic
STEEILKRVKEILDELAKELRDIIRESLRTIEELLDELRRILEESERTLEELVKTIKDGVK

SEQ ID NO: 26282 - protein, 59 aa, Artificial Sequence; identical to SEQ ID NO: 25380
  Synthetic

SEQ ID NO: 26283 - protein, 61 aa, Artificial Sequence; identical to SEQ ID NO: 26281
  Synthetic

SEQ ID NO: 26284 - protein, 59 aa, Artificial Sequence; identical to SEQ ID NO: 25380
  Synthetic

SEQ ID NO: 26285 - protein, 60 aa, Artificial Sequence
  Synthetic
SEKEELLKLIKRVIELLKRVLEEHLRLVEDVIRRLKELLDSNEKIVREVIEDLKRLLDEV

SEQ ID NO: 26286 - protein, 59 aa, Artificial Sequence
  Synthetic
EDLLRKAKKVITEVREKLKRNLEDVRRVIEDVKRKSARILEEARRLIEEVERELEKIRK

SEQ ID NO: 26287 - protein, 60 aa, Artificial Sequence; identical to SEQ ID NO: 26285
  Synthetic

SEQ ID NO: 26288 - protein, 59 aa, Artificial Sequence; identical to SEQ ID NO: 26286
  Synthetic

SEQ ID NO: 26289 - protein, 57 aa, Artificial Sequence
  Synthetic
SRAERIKRALEEHIRKLKEITDEVRKTNEELLELTRRILEEAKKANEELVKKIREAG

SEQ ID NO: 26290 - protein, 56 aa, Artificial Sequence; identical to SEQ ID NO: 25390
  Synthetic

SEQ ID NO: 26291 - protein, 57 aa, Artificial Sequence; identical to SEQ ID NO: 26289
  Synthetic

SEQ ID NO: 26292 - protein, 56 aa, Artificial Sequence; identical to SEQ ID NO: 25390
  Synthetic

SEQ ID NO: 26293 - protein, 57 aa, Artificial Sequence
  Synthetic
SEAEKIREALETNLRLLEELIKRLKEILDTHNELLRRVIETLERLLKELLELLEEGG

SEQ ID NO: 26294 - protein, 56 aa, Artificial Sequence
  Synthetic
KEDLERLRRKVEELEDRLRRLLEKLARDSAELMRELERILDRYARESEELDRRLAE

SEQ ID NO: 26295 - protein, 57 aa, Artificial Sequence; identical to SEQ ID NO: 26293
  Synthetic

SEQ ID NO: 26296 - protein, 56 aa, Artificial Sequence; identical to SEQ ID NO: 26294
  Synthetic

SEQ ID NO: 26297 - protein, 62 aa, Artificial Sequence
  Synthetic
SAEEELEKLVRKVEEDLKRLEEESERIKKEIKDTLRAIRKRSEDLKRKVKELLRRLEEEGRR

SEQ ID NO: 26298 - protein, 60 aa, Artificial Sequence
  Synthetic
ADEALEMLKRLLDKALKVHEDVLRKLVELVDEVLKVHEESLRKLLTLAAKVLEVLRKITK

SEQ ID NO: 26299 - protein, 62 aa, Artificial Sequence; identical to SEQ ID NO: 26297
  Synthetic

SEQ ID NO: 26300 - protein, 60 aa, Artificial Sequence; identical to SEQ ID NO: 26298
  Synthetic

SEQ ID NO: 26301 - protein, 60 aa, Artificial Sequence
  Synthetic
DDERRKLEDLERMVEELKRKSDKLLKEIREEVERLERETRKLLEELKAKVDELREDLRRN

SEQ ID NO: 26302 - protein, 55 aa, Artificial Sequence
  Synthetic
EDLEKAERLVKDILRLNEEHTAELEDVVRDLLRALEKHTRDLEKLVKDALDKVKT

SEQ ID NO: 26303 - protein, 60 aa, Artificial Sequence; identical to SEQ ID NO: 26301
  Synthetic

SEQ ID NO: 26304 - protein, 55 aa, Artificial Sequence; identical to SEQ ID NO: 26302
  Synthetic

SEQ ID NO: 26305 - protein, 62 aa, Artificial Sequence
  Synthetic
SKIDEALKKLAKILEDAIKLNKELNDTTAEILKEIIKLNAEVLEKIRRILKELVDLILKGLK

SEQ ID NO: 26306 - protein, 55 aa, Artificial Sequence; identical to SEQ ID NO: 25416
  Synthetic

SEQ ID NO: 26307 - protein, 62 aa, Artificial Sequence; identical to SEQ ID NO: 26305
  Synthetic

SEQ ID NO: 26308 - protein, 55 aa, Artificial Sequence; identical to SEQ ID NO: 25416
  Synthetic

SEQ ID NO: 26309 - protein, 59 aa, Artificial Sequence; identical to SEQ ID NO: 25421
  Synthetic

SEQ ID NO: 26310 - protein, 60 aa, Artificial Sequence
  Synthetic
KETLARDLKEALKTLIKLIREILEDNLRVLRRIIELIETLLEDNRRVLEEIIKLIEEATT

SEQ ID NO: 26311 - protein, 60 aa, Artificial Sequence
  Synthetic
DEEEKIREDLERTLREYERELRRAKEELKETLKRYEEELREVKEDLDRTLEEVDDLLRRG

SEQ ID NO: 26312 - protein, 60 aa, Artificial Sequence; identical to SEQ ID NO: 26310
  Synthetic

SEQ ID NO: 26313 - protein, 58 aa, Artificial Sequence
  Synthetic
DELEKVERLLEEIEKIIEDLIRRVEELVRRILEFNKTTLKRNEELVRELEKLVKETTG

SEQ ID NO: 26314 - protein, 59 aa, Artificial Sequence; identical to SEQ ID NO: 25426
  Synthetic

SEQ ID NO: 26315 - protein, 58 aa, Artificial Sequence; identical to SEQ ID NO: 26313
  Synthetic

SEQ ID NO: 26316 - protein, 59 aa, Artificial Sequence; identical to SEQ ID NO: 25426
  Synthetic

SEQ ID NO: 26317 - protein, 56 aa, Artificial Sequence
  Synthetic
SEKERLMRLLDKLKDLNRRLVERIKELLDKALELHKKLVKELRELLERLKELVERG

SEQ ID NO: 26318 - protein, 59 aa, Artificial Sequence
  Synthetic
EETVRRLREALKKLEDDLRKIERDAEREYKKLKDELEELTERYRREIRKLKEELKADRK

SEQ ID NO: 26319 - protein, 56 aa, Artificial Sequence; identical to SEQ ID NO: 26317
  Synthetic

SEQ ID NO: 26320 - protein, 59 aa, Artificial Sequence; identical to SEQ ID NO: 26318
  Synthetic

SEQ ID NO: 26321 - protein, 56 aa, Artificial Sequence
  Synthetic
SEAEDLEELIKELAELLKDVIRKLEKINRRLVKILEDIIRRLKEISKEAEEELRKG

SEQ ID NO: 26322 - protein, 59 aa, Artificial Sequence; identical to SEQ ID NO: 25434
  Synthetic

SEQ ID NO: 26323 - protein, 56 aa, Artificial Sequence; identical to SEQ ID NO: 26321
  Synthetic

SEQ ID NO: 26324 - protein, 59 aa, Artificial Sequence; identical to SEQ ID NO: 25434
  Synthetic

SEQ ID NO: 26325 - protein, 60 aa, Artificial Sequence; identical to SEQ ID NO: 25439
  Synthetic

SEQ ID NO: 26326 - protein, 60 aa, Artificial Sequence; identical to SEQ ID NO: 25440
  Synthetic

SEQ ID NO: 26327 - protein, 60 aa, Artificial Sequence; identical to SEQ ID NO: 25439
  Synthetic

SEQ ID NO: 26328 - protein, 60 aa, Artificial Sequence; identical to SEQ ID NO: 25440
  Synthetic

SEQ ID NO: 26329 - protein, 60 aa, Artificial Sequence; identical to SEQ ID NO: 25441
  Synthetic

SEQ ID NO: 26330 - protein, 59 aa, Artificial Sequence; identical to SEQ ID NO: 25442
  Synthetic

SEQ ID NO: 26331 - protein, 60 aa, Artificial Sequence; identical to SEQ ID NO: 25441
  Synthetic

SEQ ID NO: 26332 - protein, 59 aa, Artificial Sequence; identical to SEQ ID NO: 25442
  Synthetic

SEQ ID NO: 26333 - protein, 60 aa, Artificial Sequence
  Synthetic
DEDRIIEEIARLLEELLRELLELIKKLIETNRRLNEEHERAVRELARLLEELLDRLVKKG

SEQ ID NO: 26334 - protein, 59 aa, Artificial Sequence
  Synthetic
EKIAEEIERELEELRRMIKRLHEDLERKLKESEDELREIEARLEEKIRRLEEKLERKRR

SEQ ID NO: 26335 - protein, 60 aa, Artificial Sequence; identical to SEQ ID NO: 26333
  Synthetic

SEQ ID NO: 26336 - protein, 59 aa, Artificial Sequence; identical to SEQ ID NO: 26334
  Synthetic

SEQ ID NO: 26337 - protein, 59 aa, Artificial Sequence
  Synthetic
DEEEKIRTTLDLLRKLLKVLREILEELIRSNKELNERLLRLVEDSDRLLEELLKKLADD

SEQ ID NO: 26338 - protein, 59 aa, Artificial Sequence
  Synthetic
EEKVRDTEKKLRDLREKHAEIAKELERLLRENRRRLEELAREAKKVLDELRKRLEDERR

SEQ ID NO: 26339 - protein, 59 aa, Artificial Sequence; identical to SEQ ID NO: 26337
  Synthetic

SEQ ID NO: 26340 - protein, 59 aa, Artificial Sequence; identical to SEQ ID NO: 26338
  Synthetic

SEQ ID NO: 26341 - protein, 59 aa, Artificial Sequence
  Synthetic
SEKEKLLKESEEEVRRLRRTLEELLRKYREVLERLRKELREIEERVRDVVRRLKEVLDR

SEQ ID NO: 26342 - protein, 56 aa, Artificial Sequence
  Synthetic
ERLVKTLIEDVEAVIKRILELITRVAEDNERVLERIIRELTDNLERHLKIVREIVK

SEQ ID NO: 26343 - protein, 59 aa, Artificial Sequence; identical to SEQ ID NO: 26341
  Synthetic

SEQ ID NO: 26344 - protein, 56 aa, Artificial Sequence; identical to SEQ ID NO: 26342
  Synthetic

SEQ ID NO: 26345 - protein, 60 aa, Artificial Sequence
  Synthetic
SELERAEELIKKLLKLHEDVLRRLTEVDDELLEIHDRVLKRLKEVDDELLKLIRDMLRRG

SEQ ID NO: 26346 - protein, 58 aa, Artificial Sequence; identical to SEQ ID NO: 25488
  Synthetic

SEQ ID NO: 26347 - protein, 60 aa, Artificial Sequence; identical to SEQ ID NO: 26345
  Synthetic

SEQ ID NO: 26348 - protein, 58 aa, Artificial Sequence; identical to SEQ ID NO: 25488
  Synthetic

SEQ ID NO: 26349 - protein, 59 aa, Artificial Sequence; identical to SEQ ID NO: 25495
  Synthetic

SEQ ID NO: 26350 - protein, 55 aa, Artificial Sequence
  Synthetic
REIEKEIRRILEELKAKHDEIEKKIRELEREIKRAHEELEDRIRKIERDLDRRTK

SEQ ID NO: 26351 - protein, 59 aa, Artificial Sequence; identical to SEQ ID NO: 25495
  Synthetic

SEQ ID NO: 26352 - protein, 55 aa, Artificial Sequence; identical to SEQ ID NO: 26350
  Synthetic

SEQ ID NO: 26353 - protein, 60 aa, Artificial Sequence
  Synthetic
SSEELLKRIVDEDERVLEEWARVLEEIKDLSKAVVDLLDKVLKEIEAIVDEVTRRLERDG

SEQ ID NO: 26354 - protein, 55 aa, Artificial Sequence
  Synthetic
KDLLETIKKRVEEIRRTLEKIKRDYDKAIEEIRAKLERKLEEYKEVIDDLRRKTK

SEQ ID NO: 26355 - protein, 60 aa, Artificial Sequence; identical to SEQ ID NO: 26353
  Synthetic

SEQ ID NO: 26356 - protein, 55 aa, Artificial Sequence; identical to SEQ ID NO: 26354
  Synthetic

SEQ ID NO: 26357 - protein, 59 aa, Artificial Sequence; identical to SEQ ID NO: 25517
  Synthetic

SEQ ID NO: 26358 - protein, 56 aa, Artificial Sequence; identical to SEQ ID NO: 25518
  Synthetic

SEQ ID NO: 26359 - protein, 59 aa, Artificial Sequence; identical to SEQ ID NO: 25517
  Synthetic

SEQ ID NO: 26360 - protein, 56 aa, Artificial Sequence; identical to SEQ ID NO: 25518
  Synthetic

SEQ ID NO: 26361 - protein, 56 aa, Artificial Sequence
  Synthetic
DKAEVLREALKLLKDLLEELIKIHEESLKRILDLIDTLVKVHEDALRALKELLERS

SEQ ID NO: 26362 - protein, 55 aa, Artificial Sequence; identical to SEQ ID NO: 25524
  Synthetic

SEQ ID NO: 26363 - protein, 56 aa, Artificial Sequence; identical to SEQ ID NO: 26361
  Synthetic

SEQ ID NO: 26364 - protein, 55 aa, Artificial Sequence; identical to SEQ ID NO: 25524
  Synthetic

SEQ ID NO: 26365 - protein, 56 aa, Artificial Sequence
  Synthetic
STREKAKKVLDTLRADNEDMKRVVEKILRALKRTNERAEKLAREITEEIKRILKEV

SEQ ID NO: 26366 - protein, 56 aa, Artificial Sequence; identical to SEQ ID NO: 25528
  Synthetic

SEQ ID NO: 26367 - protein, 56 aa, Artificial Sequence; identical to SEQ ID NO: 26365
  Synthetic

SEQ ID NO: 26368 - protein, 56 aa, Artificial Sequence; identical to SEQ ID NO: 25528
  Synthetic

SEQ ID NO: 26369 - protein, 56 aa, Artificial Sequence
  Synthetic
SKAEKLLKDLREALEKVKRRYEELERRLDEVLKEHEEIVKRLLEELEKVLKRIEEG

SEQ ID NO: 26370 - protein, 59 aa, Artificial Sequence; identical to SEQ ID NO: 25542
  Synthetic

SEQ ID NO: 26371 - protein, 56 aa, Artificial Sequence; identical to SEQ ID NO: 26369
  Synthetic

SEQ ID NO: 26372 - protein, 59 aa, Artificial Sequence; identical to SEQ ID NO: 25542
  Synthetic

SEQ ID NO: 26373 - protein, 57 aa, Artificial Sequence; identical to SEQ ID NO: 25543
  Synthetic

SEQ ID NO: 26374 - protein, 59 aa, Artificial Sequence
  Synthetic
EDLLTELEKKLRKLKRDSEKVVDDLKKELERIKREVKRLIEENARTLADIKRAVDEARK

SEQ ID NO: 26375 - protein, 57 aa, Artificial Sequence; identical to SEQ ID NO: 25543
  Synthetic

SEQ ID NO: 26376 - protein, 59 aa, Artificial Sequence; identical to SEQ ID NO: 26374
  Synthetic

SEQ ID NO: 26377 - protein, 56 aa, Artificial Sequence; identical to SEQ ID NO: 25551
  Synthetic

SEQ ID NO: 26378 - protein, 59 aa, Artificial Sequence
  Synthetic
DDERRTLTELLKRMEDILEKVERTLKKLLDDSARMAEEVKKTLKELLERSEKVAEDVRK

SEQ ID NO: 26379 - protein, 56 aa, Artificial Sequence; identical to SEQ ID NO: 25551
  Synthetic

SEQ ID NO: 26380 - protein, 59 aa, Artificial Sequence; identical to SEQ ID NO: 26378
  Synthetic

SEQ ID NO: 26381 - protein, 56 aa, Artificial Sequence; identical to SEQ ID NO: 25555
  Synthetic

SEQ ID NO: 26382 - protein, 59 aa, Artificial Sequence; identical to SEQ ID NO: 25556
  Synthetic

SEQ ID NO: 26383 - protein, 56 aa, Artificial Sequence; identical to SEQ ID NO: 25555
  Synthetic

SEQ ID NO: 26384 - protein, 59 aa, Artificial Sequence; identical to SEQ ID NO: 25556
  Synthetic

SEQ ID NO: 26385 - protein, 60 aa, Artificial Sequence
  Synthetic
SKKELLEEVVRRAIELLKRHLEKLKRILEEIVRLLEEHLEKVERVLEAILSLLDDLLRRG

SEQ ID NO: 26386 - protein, 56 aa, Artificial Sequence
  Synthetic
EDKLKEIEDELRRLLEELRRLDKAIKDRLRELKKDLDEANRRIKETLKKLLREVEK

SEQ ID NO: 26387 - protein, 60 aa, Artificial Sequence; identical to SEQ ID NO: 26385
  Synthetic

SEQ ID NO: 26388 - protein, 56 aa, Artificial Sequence; identical to SEQ ID NO: 26386
  Synthetic

SEQ ID NO: 26389 - protein, 56 aa, Artificial Sequence
  Synthetic
SDLEELEALIRRLLKINEDLIRIIEDLIRKSLTLLKRIVDLIRELIREIEEIIRRT

SEQ ID NO: 26390 - protein, 55 aa, Artificial Sequence; identical to SEQ ID NO: 25580
  Synthetic

SEQ ID NO: 26391 - protein, 56 aa, Artificial Sequence; identical to SEQ ID NO: 26389
  Synthetic

SEQ ID NO: 26392 - protein, 55 aa, Artificial Sequence; identical to SEQ ID NO: 25580
  Synthetic

SEQ ID NO: 26393 - protein, 60 aa, Artificial Sequence
  Synthetic
SERDVLRELLERIKKLLETLIRIVEELVRRSEETIKRLAELNRRLIEEIRRIVEEVKKGV

SEQ ID NO: 26394 - protein, 55 aa, Artificial Sequence; identical to SEQ ID NO: 25606
  Synthetic

SEQ ID NO: 26395 - protein, 60 aa, Artificial Sequence; identical to SEQ ID NO: 26393
  Synthetic

SEQ ID NO: 26396 - protein, 55 aa, Artificial Sequence; identical to SEQ ID NO: 25606
  Synthetic

SEQ ID NO: 26397 - protein, 58 aa, Artificial Sequence
  Synthetic
SKEELVKEIDELNKRVNDLLEELLRKSEKLHKEILELLERLLREIISLLRRILEIVER

SEQ ID NO: 26398 - protein, 56 aa, Artificial Sequence
  Synthetic
EDELRRLLEDIERKIEALLRELKKESEEIRKRIRELLEDNRDKSRKIKKAIEELKK

SEQ ID NO: 26399 - protein, 58 aa, Artificial Sequence; identical to SEQ ID NO: 26397
  Synthetic

SEQ ID NO: 26400 - protein, 56 aa, Artificial Sequence; identical to SEQ ID NO: 26398
  Synthetic

SEQ ID NO: 26401 - protein, 60 aa, Artificial Sequence
  Synthetic
KEIEETLKELEDLNREMVETNRRVLEETRRLNKETVDRVKATLDELAKMLKKLVDDVRKG

SEQ ID NO: 26402 - protein, 55 aa, Artificial Sequence
  Synthetic
KAVEELEKALEEIKRRLKEVIDRYEDELRKLRKEYKEKIDKYERKLEEIERRERT

SEQ ID NO: 26403 - protein, 60 aa, Artificial Sequence; identical to SEQ ID NO: 26401
  Synthetic

SEQ ID NO: 26404 - protein, 55 aa, Artificial Sequence; identical to SEQ ID NO: 26402
  Synthetic

SEQ ID NO: 26405 - protein, 56 aa, Artificial Sequence; identical to SEQ ID NO: 25691
  Synthetic

SEQ ID NO: 26406 - protein, 56 aa, Artificial Sequence
  Synthetic
EDVVRALIEVIERLLRVAEEVIRRILKVNTELMRVDERSIRESLKAISEVLKVLDT

SEQ ID NO: 26407 - protein, 56 aa, Artificial Sequence; identical to SEQ ID NO: 25691
  Synthetic

SEQ ID NO: 26408 - protein, 56 aa, Artificial Sequence; identical to SEQ ID NO: 26406
  Synthetic

SEQ ID NO: 26409 - protein, 60 aa, Artificial Sequence
  Synthetic
DEDELIRKLLEDLKDIVRKILELIERDLRDIERVVRRIVKVIRDDLKKIKEVVDDIARGV

SEQ ID NO: 26410 - protein, 59 aa, Artificial Sequence
  Synthetic
SELADRIRKLIEDLERHTAKVLEDVKRAITELRKNSKDILEEVRKLIDELRKRIKEVED

SEQ ID NO: 26411 - protein, 60 aa, Artificial Sequence; identical to SEQ ID NO: 26409
  Synthetic

SEQ ID NO: 26412 - protein, 59 aa, Artificial Sequence; identical to SEQ ID NO: 26410
  Synthetic

SEQ ID NO: 26413 - protein, 59 aa, Artificial Sequence
  Synthetic
RDRDVLRKVKAEIEELVARIEKVSRDALSEVKRLLDENRKIAEDVLRLIESLLRKIRDT

SEQ ID NO: 26414 - protein, 59 aa, Artificial Sequence
  Synthetic
EEVVEELLRMLKRVAEEMKRVHDDLSRAVEKVVRDVVRVDKELLDELARILRRLEEVIT

SEQ ID NO: 26415 - protein, 59 aa, Artificial Sequence; identical to SEQ ID NO: 26413
  Synthetic

SEQ ID NO: 26416 - protein, 59 aa, Artificial Sequence; identical to SEQ ID NO: 26414
  Synthetic

SEQ ID NO: 26417 - protein, 56 aa, Artificial Sequence
  Synthetic
SKDEELARLLEELVERWRKIVEDLERDHRRLVKEIRELVERIRKKLEELVDRIRKN

SEQ ID NO: 26418 - protein, 58 aa, Artificial Sequence
  Synthetic
EEIRRILEELKRIVDDVLRIIARILKLLRDLTRRLAEVAKAVHKLLEELLRKLKEDTR

SEQ ID NO: 26419 - protein, 56 aa, Artificial Sequence; identical to SEQ ID NO: 26417
  Synthetic

SEQ ID NO: 26420 - protein, 58 aa, Artificial Sequence; identical to SEQ ID NO: 26418
  Synthetic

SEQ ID NO: 26421 - protein, 56 aa, Artificial Sequence
  Synthetic
SAAETVKRLAEESSERIRKIVEDDKRVADDSSRKIKELIEEIKRRVKELLDRIKGL

SEQ ID NO: 26422 - protein, 56 aa, Artificial Sequence
  Synthetic
KEAVIRLIEELVKLLEDVLRRLLEVNETLVELNKRVWDRLVRINEELAEVALRVAT

SEQ ID NO: 26423 - protein, 56 aa, Artificial Sequence; identical to SEQ ID NO: 26421
  Synthetic

SEQ ID NO: 26424 - protein, 56 aa, Artificial Sequence; identical to SEQ ID NO: 26422
  Synthetic

SEQ ID NO: 26425 - protein, 56 aa, Artificial Sequence
  Synthetic
SALETVKKLLEDSSEKIERIVEEDERVAKESSDRIRRLVEEDKRVADEILDLIEKI

SEQ ID NO: 26426 - protein, 56 aa, Artificial Sequence
  Synthetic
AEAVIKVIEKLIRANKRVWDALLKINEDLVRVNKTVWKELLRVNEKLARDLERVVK

SEQ ID NO: 26427 - protein, 56 aa, Artificial Sequence; identical to SEQ ID NO: 26425
  Synthetic

SEQ ID NO: 26428 - protein, 56 aa, Artificial Sequence; identical to SEQ ID NO: 26426
  Synthetic

SEQ ID NO: 26429 - protein, 60 aa, Artificial Sequence
  Synthetic
DEIETVLKRLAELIKESLDLLRETLDELRKIIEESKKSLEDVLRRLKELIDRLRRLAKEG

SEQ ID NO: 26430 - protein, 60 aa, Artificial Sequence
  Synthetic
ADELLRRVEEILKRLLELIRRIIEEHRKILERLLETHEDLIRKHEEILRRLLKAADEERQ

SEQ ID NO: 26431 - protein, 60 aa, Artificial Sequence; identical to SEQ ID NO: 26429
  Synthetic

SEQ ID NO: 26432 - protein, 60 aa, Artificial Sequence; identical to SEQ ID NO: 26430
  Synthetic

SEQ ID NO: 26433 - protein, 57 aa, Artificial Sequence
  Synthetic
SKEEKLKDDVRAVLEDLDRVLKELEKLSEDNLRELKRVLDRITDLHRRILDELRKGI

SEQ ID NO: 26434 - protein, 59 aa, Artificial Sequence
  Synthetic
SKAAEDILRVLEKLVKVSREAIKLILELSEHHVRVSTRIARLLLDVARKLAEVIKEAER

SEQ ID NO: 26435 - protein, 57 aa, Artificial Sequence; identical to SEQ ID NO: 26433
  Synthetic

SEQ ID NO: 26436 - protein, 59 aa, Artificial Sequence; identical to SEQ ID NO: 26434
  Synthetic

SEQ ID NO: 26437 - protein, 61 aa, Artificial Sequence
  Synthetic
SEIEDVIRRLRKILEDLERVSEKLLREIKKILDEARRLNEEVIKEIKRVLEDAVRVFRDGS

SEQ ID NO: 26438 - protein, 56 aa, Artificial Sequence; identical to SEQ ID NO: 25780
  Synthetic

SEQ ID NO: 26439 - protein, 60 aa, Artificial Sequence
  Synthetic
SEIEDVIRRLRKILEDLERVSEKLLREIKKILDEARRLNEEVIKEIKRVLEDAVRVFRDG

SEQ ID NO: 26440 - protein, 56 aa, Artificial Sequence; identical to SEQ ID NO: 25780
  Synthetic

SEQ ID NO: 26441 - protein, 60 aa, Artificial Sequence
  Synthetic
SREEIVATLEDLARKILEVVKKLAKEIEDAWREIERAVREILKRLEELWREIEDVVRKKV

SEQ ID NO: 26442 - protein, 59 aa, Artificial Sequence
  Synthetic
EEAVKELVELLEEILERNTRVIKEIIDLLRTVIRIHEKIVEDLIKLLEELLRRLEEATR

SEQ ID NO: 26443 - protein, 60 aa, Artificial Sequence; identical to SEQ ID NO: 26441
  Synthetic

SEQ ID NO: 26444 - protein, 59 aa, Artificial Sequence; identical to SEQ ID NO: 26442
  Synthetic

SEQ ID NO: 26445 - protein, 58 aa, Artificial Sequence; identical to SEQ ID NO: 25783
  Synthetic

SEQ ID NO: 26446 - protein, 59 aa, Artificial Sequence; identical to SEQ ID NO: 25784
  Synthetic

SEQ ID NO: 26447 - protein, 58 aa, Artificial Sequence; identical to SEQ ID NO: 25783
  Synthetic

SEQ ID NO: 26448 - protein, 59 aa, Artificial Sequence; identical to SEQ ID NO: 25784
  Synthetic

SEQ ID NO: 26449 - protein, 55 aa, Artificial Sequence
  Synthetic
SKEERLREVAEKHKKDLEDIVKRVDEAAKETARRLEEILKRLEEVLKKILDDLEK

SEQ ID NO: 26450 - protein, 55 aa, Artificial Sequence; identical to SEQ ID NO: 25794
  Synthetic

SEQ ID NO: 26451 - protein, 55 aa, Artificial Sequence; identical to SEQ ID NO: 26449
  Synthetic

SEQ ID NO: 26452 - protein, 55 aa, Artificial Sequence; identical to SEQ ID NO: 25794
  Synthetic

SEQ ID NO: 26453 - protein, 56 aa, Artificial Sequence; identical to SEQ ID NO: 25819
  Synthetic

SEQ ID NO: 26454 - protein, 62 aa, Artificial Sequence
  Synthetic
EDAVRKIAKIIEELKRLLEDLARDTRRVIEEAKRLLKEWRDRNKEVADTLKKLLEDLIRKIR

SEQ ID NO: 26455 - protein, 56 aa, Artificial Sequence; identical to SEQ ID NO: 25819
  Synthetic

SEQ ID NO: 26456 - protein, 62 aa, Artificial Sequence; identical to SEQ ID NO: 26454
  Synthetic

SEQ ID NO: 26457 - protein, 61 aa, Artificial Sequence
  Synthetic
SEDELLEKIVRKLAEAVKRIEEELRKSKREIERLVKEIKEKLEDSLARVKETLDRIRETRK

SEQ ID NO: 26458 - protein, 56 aa, Artificial Sequence
  Synthetic
LEELLRLLKEVIERSIESLERLLELILRVLEYSVASLEELLRRLLEVIKRIVDTTK

SEQ ID NO: 26459 - protein, 61 aa, Artificial Sequence; identical to SEQ ID NO: 26457
  Synthetic

SEQ ID NO: 26460 - protein, 56 aa, Artificial Sequence; identical to SEQ ID NO: 26458
  Synthetic

SEQ ID NO: 26461 - protein, 59 aa, Artificial Sequence
  Synthetic
DEDEIAEELKRLLREVEEASKEIVRRMRELAREANKASEDILRTLEKLLEELRRRVEES

SEQ ID NO: 26462 - protein, 56 aa, Artificial Sequence; identical to SEQ ID NO: 25832
  Synthetic

SEQ ID NO: 26463 - protein, 59 aa, Artificial Sequence; identical to SEQ ID NO: 26461
  Synthetic

SEQ ID NO: 26464 - protein, 56 aa, Artificial Sequence; identical to SEQ ID NO: 25832
  Synthetic

SEQ ID NO: 26465 - protein, 60 aa, Artificial Sequence
  Synthetic
DAEEKAKKIEDVARRYAEEVKRVLDDLERLLRESEEEVERIVRKLEKLARDLEERVREGT

SEQ ID NO: 26466 - protein, 59 aa, Artificial Sequence; identical to SEQ ID NO: 25854
  Synthetic

SEQ ID NO: 26467 - protein, 60 aa, Artificial Sequence; identical to SEQ ID NO: 26465
  Synthetic

SEQ ID NO: 26468 - protein, 59 aa, Artificial Sequence; identical to SEQ ID NO: 25854
  Synthetic

SEQ ID NO: 26469 - protein, 59 aa, Artificial Sequence; identical to SEQ ID NO: 25887
  Synthetic

SEQ ID NO: 26470 - protein, 55 aa, Artificial Sequence
  Synthetic
EEALDDLRRLVKELADKLRKLLKDYKDLLKELKDEAKKLLDDYARLIEELEKKAR

SEQ ID NO: 26471 - protein, 59 aa, Artificial Sequence; identical to SEQ ID NO: 25887
  Synthetic

SEQ ID NO: 26472 - protein, 55 aa, Artificial Sequence; identical to SEQ ID NO: 26470
  Synthetic

SEQ ID NO: 26473 - protein, 60 aa, Artificial Sequence
  Synthetic
SREELLDRILEAIAKILEDLKRLIDENLARLEEVVRELERIIDRNLKLIREILDELKKGS

SEQ ID NO: 26474 - protein, 59 aa, Artificial Sequence; identical to SEQ ID NO: 25896
  Synthetic

SEQ ID NO: 26475 - protein, 60 aa, Artificial Sequence; identical to SEQ ID NO: 26473
  Synthetic

SEQ ID NO: 26476 - protein, 59 aa, Artificial Sequence; identical to SEQ ID NO: 25896
  Synthetic

SEQ ID NO: 26477 - protein, 61 aa, Artificial Sequence; identical to SEQ ID NO: 25897
  Synthetic

SEQ ID NO: 26478 - protein, 60 aa, Artificial Sequence; identical to SEQ ID NO: 25898
  Synthetic

SEQ ID NO: 26479 - protein, 61 aa, Artificial Sequence; identical to SEQ ID NO: 25897
  Synthetic

SEQ ID NO: 26480 - protein, 60 aa, Artificial Sequence; identical to SEQ ID NO: 25898
  Synthetic

SEQ ID NO: 26481 - protein, 60 aa, Artificial Sequence
  Synthetic
DREKSVRDIEEDLKRVLDKLRRRVETSKEELKKVLKADKENADELEKTLRDVVRELDRGI

SEQ ID NO: 26482 - protein, 56 aa, Artificial Sequence
  Synthetic
SEVAKELDEVIKRLLDNLKENTDRLKEVIDRNLADLRDLAEELRAVIERLLEDARR

SEQ ID NO: 26483 - protein, 60 aa, Artificial Sequence; identical to SEQ ID NO: 26481
  Synthetic

SEQ ID NO: 26484 - protein, 56 aa, Artificial Sequence; identical to SEQ ID NO: 26482
  Synthetic

SEQ ID NO: 26485 - protein, 59 aa, Artificial Sequence
  Synthetic
SLEEITKRLLELVEENLARHEEILRELLELAKRLAKEDRDILEEVLKLIEELLKLLEDN

SEQ ID NO: 26486 - protein, 60 aa, Artificial Sequence; identical to SEQ ID NO: 25950
  Synthetic

SEQ ID NO: 26487 - protein, 59 aa, Artificial Sequence; identical to SEQ ID NO: 26485
  Synthetic

SEQ ID NO: 26488 - protein, 60 aa, Artificial Sequence; identical to SEQ ID NO: 25950
  Synthetic

SEQ ID NO: 26489 - protein, 60 aa, Artificial Sequence
  Synthetic
SAEEAVEKLVRIARAIVKINEDLSREVVRILREIVRLNEETTRLLVEIAREVVKVVEDGG

SEQ ID NO: 26490 - protein, 59 aa, Artificial Sequence
  Synthetic
EELLRRLEELRKRLEKVLDDSAKELEKLKRELERLLEESRRKLEKLKRDLERVLEETRR

SEQ ID NO: 26491 - protein, 60 aa, Artificial Sequence; identical to SEQ ID NO: 26489
  Synthetic

SEQ ID NO: 26492 - protein, 59 aa, Artificial Sequence; identical to SEQ ID NO: 26490
  Synthetic

SEQ ID NO: 26493 - protein, 60 aa, Artificial Sequence
  Synthetic
REDEVLRDIERLLREIEEKIRRILEESTAELRKVEEEVKRIIERTKRELKAIKEDVERKG

SEQ ID NO: 26494 - protein, 56 aa, Artificial Sequence
  Synthetic
EDLLEKIKRVIREHIKALEKLARDLKEILRRHIEALKELARDLAEVIRKLLEDVKR

SEQ ID NO: 26495 - protein, 60 aa, Artificial Sequence; identical to SEQ ID NO: 26493
  Synthetic

SEQ ID NO: 26496 - protein, 56 aa, Artificial Sequence; identical to SEQ ID NO: 26494
  Synthetic

SEQ ID NO: 26497 - protein, 58 aa, Artificial Sequence
  Synthetic
SREDLLRSLAELIETILRKSSELLDRLLKLVREHSETSERLIRELKKILEDILKLIKG

SEQ ID NO: 26498 - protein, 56 aa, Artificial Sequence
  Synthetic
EKELRRIAEAVERVLRDHKAKNDKILRDVEEVLRRHLEELARILKDVKKVLDEARK

SEQ ID NO: 26499 - protein, 58 aa, Artificial Sequence; identical to SEQ ID NO: 26497
  Synthetic

SEQ ID NO: 26500 - protein, 56 aa, Artificial Sequence; identical to SEQ ID NO: 26498
  Synthetic

SEQ ID NO: 26501 - protein, 60 aa, Artificial Sequence; identical to SEQ ID NO: 25989
  Synthetic

SEQ ID NO: 26502 - protein, 56 aa, Artificial Sequence; identical to SEQ ID NO: 25990
  Synthetic

SEQ ID NO: 26503 - protein, 60 aa, Artificial Sequence; identical to SEQ ID NO: 25989
  Synthetic

SEQ ID NO: 26504 - protein, 56 aa, Artificial Sequence; identical to SEQ ID NO: 25990
  Synthetic

SEQ ID NO: 26505 - protein, 61 aa, Artificial Sequence
  Synthetic
SKEEDVRRLIEELVRELRRILEENRRMLKELVEKLEEVLRRSEEVWRRLAKELDELLKEGN

SEQ ID NO: 26506 - protein, 59 aa, Artificial Sequence; identical to SEQ ID NO: 25992
  Synthetic

SEQ ID NO: 26507 - protein, 61 aa, Artificial Sequence; identical to SEQ ID NO: 26505
  Synthetic

SEQ ID NO: 26508 - protein, 59 aa, Artificial Sequence; identical to SEQ ID NO: 25992
  Synthetic

SEQ ID NO: 26509 - protein, 59 aa, Artificial Sequence
  Synthetic
SEKEAIKEVAELLKALIDDLLRLLKEDVDTARRVLDEIKKLLEENESIAREVLRRLREG

SEQ ID NO: 26510 - protein, 56 aa, Artificial Sequence
  Synthetic
ETDLDRIVKEMEKVLEDSIRELEKLVKRLEDILRESEKALRDLLSELAKVLEEVRT

SEQ ID NO: 26511 - protein, 59 aa, Artificial Sequence; identical to SEQ ID NO: 26509
  Synthetic

SEQ ID NO: 26512 - protein, 56 aa, Artificial Sequence; identical to SEQ ID NO: 26510
  Synthetic

SEQ ID NO: 26513 - protein, 58 aa, Artificial Sequence; identical to SEQ ID NO: 26001
  Synthetic

SEQ ID NO: 26514 - protein, 56 aa, Artificial Sequence
  Synthetic
EDTVRELTELVRRLLKRVEELLKRSLEILRELIKAIADAIKESLDILDRLLREVAR

SEQ ID NO: 26515 - protein, 58 aa, Artificial Sequence; identical to SEQ ID NO: 26001
  Synthetic

SEQ ID NO: 26516 - protein, 56 aa, Artificial Sequence; identical to SEQ ID NO: 26514
  Synthetic

SEQ ID NO: 26517 - protein, 59 aa, Artificial Sequence
  Synthetic
SEAERLADEVRKAVKKSEEDNETLVREVEKAVRELKKNNKTWVDEVRKLMKRLVDLLRD

SEQ ID NO: 26518 - protein, 60 aa, Artificial Sequence; identical to SEQ ID NO: 26024
  Synthetic

SEQ ID NO: 26519 - protein, 59 aa, Artificial Sequence; identical to SEQ ID NO: 26517
  Synthetic

SEQ ID NO: 26520 - protein, 60 aa, Artificial Sequence; identical to SEQ ID NO: 26024
  Synthetic

SEQ ID NO: 26521 - protein, 61 aa, Artificial Sequence
  Synthetic
SEKDEVTRRIRELLKEAEETNREAIERIKRLLDRVREAVEEVAKRSEELLRRLKKVLDRGL

SEQ ID NO: 26522 - protein, 57 aa, Artificial Sequence
  Synthetic
KEDLLREIARILAESLRLIRELLKEIEKIVKEIIELLERLNDELRKIIEAILETTKK

SEQ ID NO: 26523 - protein, 61 aa, Artificial Sequence; identical to SEQ ID NO: 26521
  Synthetic

SEQ ID NO: 26524 - protein, 57 aa, Artificial Sequence; identical to SEQ ID NO: 26522
  Synthetic

SEQ ID NO: 26525 - protein, 59 aa, Artificial Sequence
  Synthetic
SAEDLVRRVKDLVDKLEDKLRKVVRTNERLWEEIRKRLEELVRRNKELWDALVEKLKAG

SEQ ID NO: 26526 - protein, 56 aa, Artificial Sequence
  Synthetic
IRVLVELVRRHNKVLKELVEELEKLVRDHNRVVEEVVRELVELLSRAVEVIKEVVK

SEQ ID NO: 26527 - protein, 59 aa, Artificial Sequence; identical to SEQ ID NO: 26525
  Synthetic

SEQ ID NO: 26528 - protein, 56 aa, Artificial Sequence; identical to SEQ ID NO: 26526
  Synthetic

SEQ ID NO: 26529 - protein, 59 aa, Artificial Sequence
  Synthetic
SEKELVDDIRRILEEILRLLRSLLEEVIRLLEENEKLVRRHLKTVIDILRRVAKLLDEN

SEQ ID NO: 26530 - protein, 56 aa, Artificial Sequence; identical to SEQ ID NO: 26068
  Synthetic

SEQ ID NO: 26531 - protein, 59 aa, Artificial Sequence; identical to SEQ ID NO: 26529
  Synthetic

SEQ ID NO: 26532 - protein, 56 aa, Artificial Sequence; identical to SEQ ID NO: 26068
  Synthetic

SEQ ID NO: 26533 - protein, 62 aa, Artificial Sequence
  Synthetic
DEERLAEELERVLDRNRKLLEEALRELRRVIEENRKSVKRLLDELKRVLDELLKVLRELSRG

SEQ ID NO: 26534 - protein, 56 aa, Artificial Sequence
  Synthetic
EEDVERAVKEIRDRLRKLLEDYERAVRRLEDKLRRVRERYEAVLKRIKDKLEETKR

SEQ ID NO: 26535 - protein, 62 aa, Artificial Sequence; identical to SEQ ID NO: 26533
  Synthetic

SEQ ID NO: 26536 - protein, 56 aa, Artificial Sequence; identical to SEQ ID NO: 26534
  Synthetic

SEQ ID NO: 26537 - protein, 61 aa, Artificial Sequence
  Synthetic
SRVEELKKLIEDILRISREVVERIARVAEDIHRINRRVLDDLRKLIEDILRTVEEILARKV

SEQ ID NO: 26538 - protein, 55 aa, Artificial Sequence; identical to SEQ ID NO: 26076
  Synthetic

SEQ ID NO: 26539 - protein, 62 aa, Artificial Sequence
  Synthetic
SRVEELKKLIEDILRISREVVERIARVAEDIHRINRRVLDDLRKLIEDILRTVEEILARKVS

SEQ ID NO: 26540 - protein, 55 aa, Artificial Sequence; identical to SEQ ID NO: 26076
  Synthetic

SEQ ID NO: 26541 - protein, 60 aa, Artificial Sequence
  Synthetic
DEDRRLEDAVAKLRKEHADIMKKLDDIMRELDEDHARIKERLDRILEELKALLTRVLRET

SEQ ID NO: 26542 - protein, 54 aa, Artificial Sequence
  Synthetic
EIERIIRRVIEVIREILDLVRKVNKKALRVIEEILEDLARVNKKAVDAIDELAK

SEQ ID NO: 26543 - protein, 60 aa, Artificial Sequence; identical to SEQ ID NO: 26541
  Synthetic

SEQ ID NO: 26544 - protein, 54 aa, Artificial Sequence; identical to SEQ ID NO: 26542
  Synthetic

SEQ ID NO: 26545 - protein, 61 aa, Artificial Sequence
  Synthetic
DEVEELLKRVRELLKASEELVRKILEDVKRLLERSIEEVEDLLRKVEELLKRLLDLVERGG

SEQ ID NO: 26546 - protein, 56 aa, Artificial Sequence
  Synthetic
EDLIRDVDRVLKEIMDLLRDLVRRTKELLEELLRLLEELVRAHKELVRSILDEIRK

SEQ ID NO: 26547 - protein, 61 aa, Artificial Sequence; identical to SEQ ID NO: 26545
  Synthetic

SEQ ID NO: 26548 - protein, 56 aa, Artificial Sequence; identical to SEQ ID NO: 26546
  Synthetic

SEQ ID NO: 26549 - protein, 59 aa, Artificial Sequence
  Synthetic
SEAEELLRELEELLKKSEKVLEDLLRKNAELIKDSKARLDEVRRKVEKLAEEVEEVIRR

SEQ ID NO: 26550 - protein, 56 aa, Artificial Sequence
  Synthetic
KDAVRKLIEELKKLLEDLVEHHERLLKEDHERLKALLDHHRELLKTVLTILRETAK

SEQ ID NO: 26551 - protein, 59 aa, Artificial Sequence; identical to SEQ ID NO: 26549
  Synthetic

SEQ ID NO: 26552 - protein, 56 aa, Artificial Sequence; identical to SEQ ID NO: 26550
  Synthetic

SEQ ID NO: 26553 - protein, 59 aa, Artificial Sequence
  Synthetic
DEEELLRRVTEELKRLLDEARKLHEDVKRELEKLLKENDDLLADVKRKLESLLEALKRG

SEQ ID NO: 26554 - protein, 57 aa, Artificial Sequence
  Synthetic
ADKLLERIRALLETLLEVLKRDNEEIKRILEELLRVAEENLRRIKEIIDRLLDATRR

SEQ ID NO: 26555 - protein, 59 aa, Artificial Sequence; identical to SEQ ID NO: 26553
  Synthetic

SEQ ID NO: 26556 - protein, 57 aa, Artificial Sequence; identical to SEQ ID NO: 26554
  Synthetic

SEQ ID NO: 26557 - protein, 59 aa, Artificial Sequence
  Synthetic
DAEEVVKRLADVLRENDETIRKVVEDLVRIAEENDRLWKKLVEDIAEILRRIVELLRRG

SEQ ID NO: 26558 - protein, 59 aa, Artificial Sequence
  Synthetic
EDVKRALEELVSRLRKLLEDVKKASEDIVREVERIVRELAKRSDEILKKLEDIVEKLRE

SEQ ID NO: 26559 - protein, 59 aa, Artificial Sequence; identical to SEQ ID NO: 26557
  Synthetic

SEQ ID NO: 26560 - protein, 59 aa, Artificial Sequence; identical to SEQ ID NO: 26558
  Synthetic

SEQ ID NO: 26561 - protein, 56 aa, Artificial Sequence
  Synthetic
DKDKRLEELLKRLKELNDKTFEELERILEELKRANEASLREAERILEELRARIEGG

SEQ ID NO: 26562 - protein, 59 aa, Artificial Sequence; identical to SEQ ID NO: 26128
  Synthetic

SEQ ID NO: 26563 - protein, 56 aa, Artificial Sequence; identical to SEQ ID NO: 26561
  Synthetic

SEQ ID NO: 26564 - protein, 59 aa, Artificial Sequence; identical to SEQ ID NO: 26128
  Synthetic

SEQ ID NO: 26565 - protein, 56 aa, Artificial Sequence
  Synthetic
SKEETLKRLLDELEKRNRETVERLERLLKELEDRNRASLEELEAVLEELERKIEES

SEQ ID NO: 26566 - protein, 59 aa, Artificial Sequence
  Synthetic
EEVKDIVRAMEEVIRRLIEILRRDVELNLDVAKKLLELLKEDSKLNLDVARELLELLDR

SEQ ID NO: 26567 - protein, 56 aa, Artificial Sequence; identical to SEQ ID NO: 26565
  Synthetic

SEQ ID NO: 26568 - protein, 59 aa, Artificial Sequence; identical to SEQ ID NO: 26566
  Synthetic

SEQ ID NO: 26569 - protein, 57 aa, Artificial Sequence
  Synthetic
DEEETLRRLLERKVELAKEYLDVSKEVIDRTTKLLDEYLKTSKRIVDATVELLERGD

SEQ ID NO: 26570 - protein, 60 aa, Artificial Sequence
  Synthetic
SREALEEARRRLEELLRELNEITKDLEAKLEKLLRDLNELTKALEEELKRLLDELKKRTD

SEQ ID NO: 26571 - protein, 57 aa, Artificial Sequence; identical to SEQ ID NO: 26569
  Synthetic

SEQ ID NO: 26572 - protein, 60 aa, Artificial Sequence; identical to SEQ ID NO: 26570
  Synthetic

SEQ ID NO: 26573 - protein, 56 aa, Artificial Sequence
  Synthetic
SEAERTKESLKKVLKALVDLNRELLRKLEENMRELTKLNEEVKRALKEVLDKVREG

SEQ ID NO: 26574 - protein, 59 aa, Artificial Sequence
  Synthetic
EEIRKIVEEILKEIKELADRYREEVRKSKDKLRSILEDYKRKVDELKERLRELIEEVET

SEQ ID NO: 26575 - protein, 56 aa, Artificial Sequence; identical to SEQ ID NO: 26573
  Synthetic

SEQ ID NO: 26576 - protein, 59 aa, Artificial Sequence; identical to SEQ ID NO: 26574
  Synthetic

SEQ ID NO: 26577 - protein, 61 aa, Artificial Sequence
  Synthetic
SEVEDILRRLAELNKRLIDKLRELIDRIARLNEELLRVVEDILSRLKRLADELIRVVRERG

SEQ ID NO: 26578 - protein, 56 aa, Artificial Sequence
  Synthetic
DEDLKRLLEKLKEDVERVLKEVRDRTAESLKHLEDVIRELEKKTEDSLRHMEERRK

SEQ ID NO: 26579 - protein, 61 aa, Artificial Sequence; identical to SEQ ID NO: 26577
  Synthetic

SEQ ID NO: 26580 - protein, 56 aa, Artificial Sequence; identical to SEQ ID NO: 26578
  Synthetic

SEQ ID NO: 26581 - protein, 60 aa, Artificial Sequence
  Synthetic
DEERIIKTLEDINAKLVEDIKRILDKVAELNERLADAIRKILEETKRILEATTRKVRKDG

SEQ ID NO: 26582 - protein, 56 aa, Artificial Sequence
  Synthetic
KDTLRTVEKLVEDVKRRLDKLLEDYKRLIEEVKKELDKLLKEYEDALREIKKRIDE

SEQ ID NO: 26583 - protein, 60 aa, Artificial Sequence; identical to SEQ ID NO: 26581
  Synthetic

SEQ ID NO: 26584 - protein, 56 aa, Artificial Sequence; identical to SEQ ID NO: 26582
  Synthetic

SEQ ID NO: 26585 - protein, 58 aa, Artificial Sequence; identical to SEQ ID NO: 26193
  Synthetic

SEQ ID NO: 26586 - protein, 56 aa, Artificial Sequence
  Synthetic
REEVKRVLEEARDELRRLLEEYKAIIEELERELERLLREHREVIRRIKEEIDKSSK

SEQ ID NO: 26587 - protein, 58 aa, Artificial Sequence; identical to SEQ ID NO: 26193
  Synthetic

SEQ ID NO: 26588 - protein, 56 aa, Artificial Sequence; identical to SEQ ID NO: 26586
  Synthetic

SEQ ID NO: 26589 - protein, 59 aa, Artificial Sequence; identical to SEQ ID NO: 26195
  Synthetic

SEQ ID NO: 26590 - protein, 56 aa, Artificial Sequence; identical to SEQ ID NO: 26196
  Synthetic

SEQ ID NO: 26591 - protein, 59 aa, Artificial Sequence; identical to SEQ ID NO: 26195
  Synthetic

SEQ ID NO: 26592 - protein, 56 aa, Artificial Sequence; identical to SEQ ID NO: 26196
  Synthetic

SEQ ID NO: 26593 - protein, 60 aa, Artificial Sequence
  Synthetic
SLEEIVKKLEDLNKKAVEILRRVLEEHEKLVEKVKKVLRDVLRLLEKVVREVIETLKKGD

SEQ ID NO: 26594 - protein, 56 aa, Artificial Sequence
  Synthetic
EEVLRKLKEIIKELKDRLKKLLDDYERIIDELRAELERVLREYEKILEDLRKELED

SEQ ID NO: 26595 - protein, 60 aa, Artificial Sequence; identical to SEQ ID NO: 26593
  Synthetic

SEQ ID NO: 26596 - protein, 56 aa, Artificial Sequence; identical to SEQ ID NO: 26594
  Synthetic

SEQ ID NO: 26597 - protein, 59 aa, Artificial Sequence
  Synthetic
SADEALEELVRRLLEVLKTVLERTKELSRDDLRVVKEVLRIIEELVKRLLKVIRDGLDD

SEQ ID NO: 26598 - protein, 59 aa, Artificial Sequence
  Synthetic
EDVRRDIERLLEELKRRVERLLEDIERLLAELEKLNEDVLRENKALLEDLERRVRERKK

SEQ ID NO: 26599 - protein, 59 aa, Artificial Sequence; identical to SEQ ID NO: 26597
  Synthetic

SEQ ID NO: 26600 - protein, 59 aa, Artificial Sequence; identical to SEQ ID NO: 26598
  Synthetic

SEQ ID NO: 26601 - protein, 59 aa, Artificial Sequence
  Synthetic
REVEEIERRLRELVRRSDELVRTVAEELEKLVRRNKKLVEDVMKRLRDLVERLRELVDA

SEQ ID NO: 26602 - protein, 58 aa, Artificial Sequence
  Synthetic
SGSKEVLDILERAVEVVRRVIKALKEVLERHVDATREVIERVKRVNKRLLEAVREVVT

SEQ ID NO: 26603 - protein, 58 aa, Artificial Sequence
  Synthetic
GVPEEIDRELKRVVEELRRLHEEIKERLDDVARRSEEELRRIIKKLKEVVKEIRKKLK

SEQ ID NO: 26604 - protein, 55 aa, Artificial Sequence
  Synthetic
DLLRKLEEELRRIKEKLRKALEELEREHRELEKELDKLHDESRKEHERIEEELRR

SEQ ID NO: 26605 - protein, 57 aa, Artificial Sequence
  Synthetic
DEDLLEKIKRVIREHIKALEKLARDLKEILRRHIEALKELARDLAEVIRKLLEDVKR

SEQ ID NO: 26606 - protein, 54 aa, Artificial Sequence
  Synthetic
DLERLRRKVEELEDRLRRLLEKLARDSAELMRELERILDRYARESEELDRRLAE

SEQ ID NO: 26607 - protein, 54 aa, Artificial Sequence
  Synthetic
DLEDILRKNLDRLRKLLERLREILRENLEALKKTLKRLEDVVREILEDLKRERK

SEQ ID NO: 26608 - protein, 54 aa, Artificial Sequence; identical to SEQ ID NO: 26606
  Synthetic

SEQ ID NO: 26609 - protein, 58 aa, Artificial Sequence; identical to SEQ ID NO: 26602
  Synthetic

SEQ ID NO: 26610 - protein, 54 aa, Artificial Sequence; identical to SEQ ID NO: 26606
  Synthetic

SEQ ID NO: 26611 - protein, 58 aa, Artificial Sequence
  Synthetic
RLIEEVVRLLRENLDVVRRILEALAKLIKELLEALEEVLRRNKELIRELLRVLDEALK

SEQ ID NO: 26612 - protein, 55 aa, Artificial Sequence
  Synthetic
DIVRAMEEVIRRLIEILRRDVELNLDVAKKLLELLKEDSKLNLDVARELLELLDR

SEQ ID NO: 26613 - protein, 55 aa, Artificial Sequence; identical to SEQ ID NO: 26612
  Synthetic

SEQ ID NO: 26614 - protein, 58 aa, Artificial Sequence; identical to SEQ ID NO: 26611
  Synthetic

SEQ ID NO: 26615 - protein, 58 aa, Artificial Sequence; identical to SEQ ID NO: 26611
  Synthetic

SEQ ID NO: 26616 - protein, 55 aa, Artificial Sequence; identical to SEQ ID NO: 26604
  Synthetic

SEQ ID NO: 26617 - protein, 55 aa, Artificial Sequence; identical to SEQ ID NO: 26604
  Synthetic

SEQ ID NO: 26618 - protein, 58 aa, Artificial Sequence
  Synthetic
ELAREVERVIKELLDKSKEILERIERAIDELLKVSEEILKLSEDASEELLKILREFAK

SEQ ID NO: 26619 - protein, 58 aa, Artificial Sequence
  Synthetic
DVKDIIRTILEVARDLLRLLEEDSRTNSEVVKRLLDLLREDSKANSEVVKRLLDVLRE

SEQ ID NO: 26620 - protein, 54 aa, Artificial Sequence; identical to SEQ ID NO: 26606
  Synthetic

SEQ ID NO: 26621 - protein, 54 aa, Artificial Sequence; identical to SEQ ID NO: 26606
  Synthetic

SEQ ID NO: 26622 - protein, 58 aa, Artificial Sequence; identical to SEQ ID NO: 26611
  Synthetic

SEQ ID NO: 26623 - protein, 54 aa, Artificial Sequence; identical to SEQ ID NO: 26607
  Synthetic

SEQ ID NO: 26624 - protein, 55 aa, Artificial Sequence; identical to SEQ ID NO: 26604
  Synthetic

SEQ ID NO: 26625 - protein, 57 aa, Artificial Sequence; identical to SEQ ID NO: 26605
  Synthetic

SEQ ID NO: 26626 - protein, 58 aa, Artificial Sequence
  Synthetic
ELVRIAIEVLKRLLEIIEELVRLNNEILERLLKIVRELHKDNIKILEDLLRIIEEVLR

SEQ ID NO: 26627 - protein, 58 aa, Artificial Sequence; identical to SEQ ID NO: 26626
  Synthetic

SEQ ID NO: 26628 - protein, 58 aa, Artificial Sequence
  Synthetic
RLARLLKALADKLIRVLEEILKINEELNRKIIKFARENLERNRRVNKKVIEVLREAAR

SEQ ID NO: 26629 - protein, 54 aa, Artificial Sequence; identical to SEQ ID NO: 26606
  Synthetic

SEQ ID NO: 26630 - protein, 58 aa, Artificial Sequence; identical to SEQ ID NO: 26626
  Synthetic

SEQ ID NO: 26631 - protein, 58 aa, Artificial Sequence; identical to SEQ ID NO: 26626
  Synthetic

SEQ ID NO: 26632 - protein, 55 aa, Artificial Sequence; identical to SEQ ID NO: 26612
  Synthetic

SEQ ID NO: 26633 - protein, 58 aa, Artificial Sequence
  Synthetic
RKIAKIIEELKRLLEDLARDTRRVIEEAKRLLKEWRDRNKEVADTLKKLLEDLIRKIR

SEQ ID NO: 26634 - protein, 55 aa, Artificial Sequence; identical to SEQ ID NO: 26604
  Synthetic

SEQ ID NO: 26635 - protein, 55 aa, Artificial Sequence; identical to SEQ ID NO: 26604
  Synthetic

SEQ ID NO: 26636 - protein, 58 aa, Artificial Sequence; identical to SEQ ID NO: 26633
  Synthetic

SEQ ID NO: 26637 - protein, 58 aa, Artificial Sequence; identical to SEQ ID NO: 26626
  Synthetic

SEQ ID NO: 26638 - protein, 57 aa, Artificial Sequence
  Synthetic
TVRRLREALKKLEDDLRKIERDAEREYKKLKDELEELTERYRREIRKLKEELKADRK

SEQ ID NO: 26639 - protein, 58 aa, Artificial Sequence
  Synthetic
DEAERRRRELKDKLDRLREEHEEVKRRLEEELTRLRETHKKIEKELREALKRVRDRST

SEQ ID NO: 26640 - protein, 58 aa, Artificial Sequence; identical to SEQ ID NO: 26639
  Synthetic

SEQ ID NO: 26641 - protein, 54 aa, Artificial Sequence; identical to SEQ ID NO: 26607
  Synthetic

SEQ ID NO: 26642 - protein, 54 aa, Artificial Sequence; identical to SEQ ID NO: 26606
  Synthetic

SEQ ID NO: 26643 - protein, 58 aa, Artificial Sequence; identical to SEQ ID NO: 26639
  Synthetic

SEQ ID NO: 26644 - protein, 58 aa, Artificial Sequence; identical to SEQ ID NO: 26639
  Synthetic

SEQ ID NO: 26645 - protein, 58 aa, Artificial Sequence; identical to SEQ ID NO: 26639
  Synthetic

SEQ ID NO: 26646 - protein, 56 aa, Artificial Sequence
  Synthetic
DKAVEELEKALEEIKRRLKEVIDRYEDELRKLRKEYKEKIDKYERKLEEIERRERT

SEQ ID NO: 26647 - protein, 58 aa, Artificial Sequence
  Synthetic
DVKRALEELVSRLRKLLEDVKKASEDIVREVERIVRELAKRSDEILKKLEDIVEKLRE

SEQ ID NO: 26648 - protein, 58 aa, Artificial Sequence; identical to SEQ ID NO: 26647
  Synthetic

SEQ ID NO: 26649 - protein, 58 aa, Artificial Sequence; identical to SEQ ID NO: 26639
  Synthetic

SEQ ID NO: 26650 - protein, 58 aa, Artificial Sequence; identical to SEQ ID NO: 26647
  Synthetic

SEQ ID NO: 26651 - protein, 58 aa, Artificial Sequence
  Synthetic
EVKRRLEEKERRIRTRYEELRRRLRKRVKDYEDKLREIEKKVRRDAERIEEELERAKK

SEQ ID NO: 26652 - protein, 58 aa, Artificial Sequence; identical to SEQ ID NO: 26639
  Synthetic

SEQ ID NO: 26653 - protein, 58 aa, Artificial Sequence
  Synthetic
KIAEEIERELEELRRMIKRLHEDLERKLKESEDELREIEARLEEKIRRLEEKLERKRR

SEQ ID NO: 26654 - protein, 58 aa, Artificial Sequence; identical to SEQ ID NO: 26653
  Synthetic

SEQ ID NO: 26655 - protein, 56 aa, Artificial Sequence; identical to SEQ ID NO: 26646
  Synthetic

SEQ ID NO: 26656 - protein, 58 aa, Artificial Sequence; identical to SEQ ID NO: 26653
  Synthetic

SEQ ID NO: 26657 - protein, 58 aa, Artificial Sequence; identical to SEQ ID NO: 26626
  Synthetic

SEQ ID NO: 26658 - protein, 55 aa, Artificial Sequence; identical to SEQ ID NO: 26076
  Synthetic

SEQ ID NO: 26659 - protein, 58 aa, Artificial Sequence; identical to SEQ ID NO: 26647
  Synthetic

SEQ ID NO: 26660 - protein, 58 aa, Artificial Sequence; identical to SEQ ID NO: 26639
  Synthetic

SEQ ID NO: 26661 - protein, 58 aa, Artificial Sequence; identical to SEQ ID NO: 26639
  Synthetic

SEQ ID NO: 26662 - protein, 58 aa, Artificial Sequence
  Synthetic
TLREVVRKVLEEAKRLLDELEEVHKRVKKELEDIIEENRRVVKRVRDELREIKRELDE

SEQ ID NO: 26663 - protein, 58 aa, Artificial Sequence; identical to SEQ ID NO: 26647
  Synthetic

SEQ ID NO: 26664 - protein, 58 aa, Artificial Sequence; identical to SEQ ID NO: 26647
  Synthetic

SEQ ID NO: 26665 - protein, 58 aa, Artificial Sequence; identical to SEQ ID NO: 26639
  Synthetic

SEQ ID NO: 26666 - protein, 58 aa, Artificial Sequence; identical to SEQ ID NO: 26639
  Synthetic

SEQ ID NO: 26667 - protein, 58 aa, Artificial Sequence; identical to SEQ ID NO: 26653
  Synthetic

SEQ ID NO: 26668 - protein, 58 aa, Artificial Sequence; identical to SEQ ID NO: 26647
  Synthetic

SEQ ID NO: 26669 - protein, 58 aa, Artificial Sequence
  Synthetic
SEAERLADEVRKAVKKSEEDNETLVREVEKAVRELKKNNKTWVDEVRKLMKRLVDLLR

SEQ ID NO: 26670 - protein, 58 aa, Artificial Sequence; identical to SEQ ID NO: 26669
  Synthetic

SEQ ID NO: 26671 - protein, 58 aa, Artificial Sequence
  Synthetic
DKDKRLEELLKRLKELNDKTFEELERILEELKRANEASLREAERILEELRARIEGGNL

SEQ ID NO: 26672 - protein, 58 aa, Artificial Sequence
  Synthetic
SEAEDLEELIKELAELLKDVIRKLEKINRRLVKILEDIIRRLKEISKEAEEELRKGTV

SEQ ID NO: 26673 - protein, 58 aa, Artificial Sequence
  Synthetic
SDKEEIKRRVEKTARDLETEHDKIKKRLEDTVRDIKRELDELLEKYERVLRKIEKTLR

SEQ ID NO: 26674 - protein, 58 aa, Artificial Sequence
  Synthetic
SEAEKIREALETNLRLLEELIKRLKEILDTHNELLRRVIETLERLLKELLELLEEGGL

SEQ ID NO: 26675 - protein, 58 aa, Artificial Sequence; identical to SEQ ID NO: 26674
  Synthetic

SEQ ID NO: 26676 - protein, 58 aa, Artificial Sequence
  Synthetic
SKEERLREVAEKHKKDLEDIVKRVDEAAKETARRLEEILKRLEEVLKKILDDLEKGPD

SEQ ID NO: 26677 - protein, 58 aa, Artificial Sequence
  Synthetic
SLEEITKRLLELVEENLARHEEILRELLELAKRLAKEDRDILEEVLKLIEELLKLLED

SEQ ID NO: 26678 - protein, 58 aa, Artificial Sequence
  Synthetic
SKEETLKRLLDELEKRNRETVERLERLLKELEDRNRASLEELEAVLEELERKIEESGL

SEQ ID NO: 26679 - protein, 58 aa, Artificial Sequence; identical to SEQ ID NO: 26678
  Synthetic

SEQ ID NO: 26680 - protein, 58 aa, Artificial Sequence; identical to SEQ ID NO: 26678
  Synthetic

SEQ ID NO: 26681 - protein, 58 aa, Artificial Sequence
  Synthetic
STREKAKKVLDTLRADNEDMKRVVEKILRALKRTNERAEKLAREITEEIKRILKEVGV

SEQ ID NO: 26682 - protein, 58 aa, Artificial Sequence
  Synthetic
DAEEVVKRLADVLRENDETIRKVVEDLVRIAEENDRLWKKLVEDIAEILRRIVELLRR

SEQ ID NO: 26683 - protein, 58 aa, Artificial Sequence; identical to SEQ ID NO: 26678
  Synthetic

SEQ ID NO: 26684 - protein, 58 aa, Artificial Sequence; identical to SEQ ID NO: 26681
  Synthetic

SEQ ID NO: 26685 - protein, 58 aa, Artificial Sequence
  Synthetic
SKEEEVEKVLRKWEEILRRLIEENKRANDKIRREYEELVKEIRRVLEEIKEVAERLGV

SEQ ID NO: 26686 - protein, 58 aa, Artificial Sequence
  Synthetic
DREKSVRDIEEDLKRVLDKLRRRVETSKEELKKVLKADKENADELEKTLRDVVRELDR

SEQ ID NO: 26687 - protein, 58 aa, Artificial Sequence; identical to SEQ ID NO: 26673
  Synthetic

SEQ ID NO: 26688 - protein, 58 aa, Artificial Sequence; identical to SEQ ID NO: 26681
  Synthetic

SEQ ID NO: 26689 - protein, 58 aa, Artificial Sequence
  Synthetic
SKDEELARLLEELVERWRKIVEDLERDHRRLVKEIRELVERIRKKLEELVDRIRKNGI

SEQ ID NO: 26690 - protein, 58 aa, Artificial Sequence; identical to SEQ ID NO: 26669
  Synthetic

SEQ ID NO: 26691 - protein, 58 aa, Artificial Sequence; identical to SEQ ID NO: 26689
  Synthetic

SEQ ID NO: 26692 - protein, 58 aa, Artificial Sequence
  Synthetic
KEIEETLKELEDLNREMVETNRRVLEETRRLNKETVDRVKATLDELAKMLKKLVDDVR

SEQ ID NO: 26693 - protein, 58 aa, Artificial Sequence; identical to SEQ ID NO: 26669
  Synthetic

SEQ ID NO: 26694 - protein, 58 aa, Artificial Sequence; identical to SEQ ID NO: 26678
  Synthetic

SEQ ID NO: 26695 - protein, 58 aa, Artificial Sequence
  Synthetic
DKAEVLREALKLLKDLLEELIKIHEESLKRILDLIDTLVKVHEDALRALKELLERSGL

SEQ ID NO: 26696 - protein, 58 aa, Artificial Sequence; identical to SEQ ID NO: 26685
  Synthetic

SEQ ID NO: 26697 - protein, 58 aa, Artificial Sequence; identical to SEQ ID NO: 26678
  Synthetic

SEQ ID NO: 26698 - protein, 56 aa, Artificial Sequence
  Synthetic
SERVKEILERILRVVEEAVRLNEESLRRILDVVRKAVKLDRESLKKILDVVEEAVR

SEQ ID NO: 26699 - protein, 56 aa, Artificial Sequence; identical to SEQ ID NO: 26698
  Synthetic

SEQ ID NO: 26700 - protein, 57 aa, Artificial Sequence
  Synthetic
DERRIAERIRELLRESKKLVRDVVEEAKRLLKENRDSTRKIIEDIRRLLRKIEDSTR

SEQ ID NO: 26701 - protein, 55 aa, Artificial Sequence
  Synthetic
DALSRLLEELLRVVDDLIRVLKELIDKSRKVIEELLELLKRINEENLKVLAEIIK

SEQ ID NO: 26702 - protein, 57 aa, Artificial Sequence; identical to SEQ ID NO: 26700
  Synthetic

SEQ ID NO: 26703 - protein, 58 aa, Artificial Sequence
  Synthetic
EALRKLVELLVEVLRRLIRVNRELVKLLREVLERLLRILRESVKKLKRLIEKVIKDAT

SEQ ID NO: 26704 - protein, 58 aa, Artificial Sequence; identical to SEQ ID NO: 26703
  Synthetic

SEQ ID NO: 26705 - protein, 58 aa, Artificial Sequence
  Synthetic
AAKRLVEELLKAVTDLSRKNKRILEELLKAIETLSDENKKILTEILDALRRLVEKIEK

SEQ ID NO: 26706 - protein, 58 aa, Artificial Sequence; identical to SEQ ID NO: 26703
  Synthetic

SEQ ID NO: 26707 - protein, 58 aa, Artificial Sequence; identical to SEQ ID NO: 26703
  Synthetic

SEQ ID NO: 26708 - protein, 55 aa, Artificial Sequence; identical to SEQ ID NO: 26701
  Synthetic

SEQ ID NO: 26709 - protein, 55 aa, Artificial Sequence; identical to SEQ ID NO: 26701
  Synthetic

SEQ ID NO: 26710 - protein, 58 aa, Artificial Sequence
  Synthetic
RAVKKLDEIVKEVAKKLEDVVRANEELWRALVELNKESVRRLREIVERVARDLEETAR

SEQ ID NO: 26711 - protein, 58 aa, Artificial Sequence
  Synthetic
DRLDKVEELVKKLLEDTKRTVDRVRELVRKILKKSRETLEELERLIEKILRELEKDAR

SEQ ID NO: 26712 - protein, 55 aa, Artificial Sequence; identical to SEQ ID NO: 26701
  Synthetic

SEQ ID NO: 26713 - protein, 58 aa, Artificial Sequence; identical to SEQ ID NO: 26710
  Synthetic

SEQ ID NO: 26714 - protein, 58 aa, Artificial Sequence; identical to SEQ ID NO: 26710
  Synthetic

SEQ ID NO: 26715 - protein, 57 aa, Artificial Sequence
  Synthetic
SEDDLKRVVDEVEKKLRELKRRYAEALERIKEKIKELKDRYERAVREVVAELRKTTK

SEQ ID NO: 26716 - protein, 58 aa, Artificial Sequence; identical to SEQ ID NO: 26710
  Synthetic

SEQ ID NO: 26717 - protein, 55 aa, Artificial Sequence; identical to SEQ ID NO: 26076
  Synthetic

SEQ ID NO: 26718 - protein, 57 aa, Artificial Sequence; identical to SEQ ID NO: 26715
  Synthetic

SEQ ID NO: 26719 - protein, 58 aa, Artificial Sequence
  Synthetic
DEAKELLDEIRKAVKESEDRLEKLLRDYEKELRRLEKELRDLKRRIEEKLEELRRGSL

SEQ ID NO: 26720 - protein, 58 aa, Artificial Sequence
  Synthetic
SEKEDAARKLRKLVEELTREYEELVKKLERLIEEIEKVSEESVRKLEKLLAEISEEVR

SEQ ID NO: 26721 - protein, 58 aa, Artificial Sequence
  Synthetic
SEDEIIKKIIEDLRRVLKEVEEIHKEVEERLDKVLKEAEEMHKEVLKELDRVLDEVKR

SEQ ID NO: 26722 - protein, 58 aa, Artificial Sequence
  Synthetic
SKAEEIAEKLDRLLEENRRALEEITTRLDDLLRRNKDALRKVMEKLKRLLDDLRRGGI

SEQ ID NO: 26723 - protein, 58 aa, Artificial Sequence
  Synthetic
SEKEKLLKESEEEVRRLRRTLEELLRKYREVLERLRKELREIEERVRDVVRRLKEVLD

SEQ ID NO: 26724 - protein, 58 aa, Artificial Sequence; identical to SEQ ID NO: 26720
  Synthetic

SEQ ID NO: 26725 - protein, 58 aa, Artificial Sequence
  Synthetic
SKEETLRKEAEDLLRRLEELTRRLEKKARELLERAKKLSRDLAEELKRLLKELREKGV

SEQ ID NO: 26726 - protein, 58 aa, Artificial Sequence; identical to SEQ ID NO: 26720
  Synthetic

SEQ ID NO: 26727 - protein, 58 aa, Artificial Sequence; identical to SEQ ID NO: 26722
  Synthetic

SEQ ID NO: 26728 - protein, 58 aa, Artificial Sequence; identical to SEQ ID NO: 26720
  Synthetic

SEQ ID NO: 26729 - protein, 58 aa, Artificial Sequence; identical to SEQ ID NO: 26722
  Synthetic

SEQ ID NO: 26730 - protein, 58 aa, Artificial Sequence; identical to SEQ ID NO: 26725
  Synthetic

SEQ ID NO: 26731 - protein, 58 aa, Artificial Sequence
  Synthetic
SRVEELKKLIEDILRISREVVERIKRVAEDIHRINRRVLDDLRKLIEDILRTVEEILA

SEQ ID NO: 26732 - protein, 58 aa, Artificial Sequence; identical to SEQ ID NO: 26725
  Synthetic

SEQ ID NO: 26733 - protein, 58 aa, Artificial Sequence; identical to SEQ ID NO: 26722
  Synthetic

SEQ ID NO: 26734 - protein, 58 aa, Artificial Sequence; identical to SEQ ID NO: 26725
  Synthetic

SEQ ID NO: 26735 - protein, 58 aa, Artificial Sequence; identical to SEQ ID NO: 26720
  Synthetic

SEQ ID NO: 26736 - protein, 58 aa, Artificial Sequence; identical to SEQ ID NO: 26725
  Synthetic

SEQ ID NO: 26737 - protein, 58 aa, Artificial Sequence
  Synthetic
SERETVKRRLEELLKEVKRTLDKLKEEHDRLLEDVRRVVEELKREHDKLLKEVKDSGV

SEQ ID NO: 26738 - protein, 58 aa, Artificial Sequence; identical to SEQ ID NO: 26720
  Synthetic

SEQ ID NO: 26739 - protein, 58 aa, Artificial Sequence; identical to SEQ ID NO: 26725
  Synthetic

SEQ ID NO: 26740 - protein, 58 aa, Artificial Sequence
  Synthetic
KEREEVKEKLDRLLEEVEKTVRELKREHDELLKEVEKLVRDLKKEHDELLKKVKDDGV

SEQ ID NO: 26741 - protein, 58 aa, Artificial Sequence
  Synthetic
SREEVLRELEEVIEDNRRLLEELIEKSKKVLDESLKLIDELLRRLEEVLERVLRLLEE

SEQ ID NO: 26742 - protein, 56 aa, Artificial Sequence; identical to SEQ ID NO: 16914
  Synthetic

SEQ ID NO: 26743 - protein, 57 aa, Artificial Sequence
  Synthetic
SEDSVERIARELERNLDDLARVLKESEDDLAEILRRLKEVLEESERDLERVEREVRK

SEQ ID NO: 26744 - protein, 56 aa, Artificial Sequence; identical to SEQ ID NO: 25244
  Synthetic

SEQ ID NO: 26745 - protein, 57 aa, Artificial Sequence
  Synthetic
SKEKIDRIIRELERILEEAKKKHEDVLRRLEDSLRRVAELLKAALDRLREIVDRLRR

SEQ ID NO: 26746 - protein, 56 aa, Artificial Sequence; identical to SEQ ID NO: 16914
  Synthetic

SEQ ID NO: 26747 - protein, 57 aa, Artificial Sequence
  Synthetic
DIKTLLDRVRKLAEEDAERLDRLRRESEELNERVRRVDKKLLEEIRRKAKKVEDDTR

SEQ ID NO: 26748 - protein, 57 aa, Artificial Sequence
  Synthetic
DAETLLRELEKLSRDNKELLKKIEKEIRDLIKEDKERNIELSERLRKLVEELKKKAT

SEQ ID NO: 26749 - protein, 56 aa, Artificial Sequence; identical to SEQ ID NO: 16914
  Synthetic

SEQ ID NO: 26750 - protein, 57 aa, Artificial Sequence; identical to SEQ ID NO: 26747
  Synthetic

SEQ ID NO: 26751 - protein, 56 aa, Artificial Sequence
  Synthetic
SEELSAEVKKLLDEVRKALARHKDENDKLLKEIEDSLRRHKEENDRLLEKLKESTR

SEQ ID NO: 26752 - protein, 57 aa, Artificial Sequence
  Synthetic
DADDVLARVEELAKRAHDENERLIREVEELVRAHNKRNKELVDEVKRLVEKVIEEER

SEQ ID NO: 26753 - protein, 57 aa, Artificial Sequence; identical to SEQ ID NO: 26745
  Synthetic

SEQ ID NO: 26754 - protein, 56 aa, Artificial Sequence; identical to SEQ ID NO: 16914
  Synthetic

SEQ ID NO: 26755 - protein, 56 aa, Artificial Sequence; identical to SEQ ID NO: 26751
  Synthetic

SEQ ID NO: 26756 - protein, 57 aa, Artificial Sequence
  Synthetic
DAETVLRSAEDIVAKNRKLAEEVLRRVKKIVEENRKIASEVLDDVRKLVEDVLARAS

SEQ ID NO: 26757 - protein, 57 aa, Artificial Sequence; identical to SEQ ID NO: 26752
  Synthetic

SEQ ID NO: 26758 - protein, 57 aa, Artificial Sequence; identical to SEQ ID NO: 26745
  Synthetic

SEQ ID NO: 26759 - protein, 57 aa, Artificial Sequence
  Synthetic
DEEKLKDLIRKLRDILRRAAEAHKKLIDDARESLERAKREHEKLIDRLKKILEELER

SEQ ID NO: 26760 - protein, 57 aa, Artificial Sequence; identical to SEQ ID NO: 26747
  Synthetic

SEQ ID NO: 26761 - protein, 57 aa, Artificial Sequence
  Synthetic
DATRVIEEAKRILDEARKLNEETIRRSEELVRRIERVIEEIIKRSEKLLEDVARESK

SEQ ID NO: 26762 - protein, 56 aa, Artificial Sequence; identical to SEQ ID NO: 26751
  Synthetic

SEQ ID NO: 26763 - protein, 57 aa, Artificial Sequence; identical to SEQ ID NO: 26756
  Synthetic

SEQ ID NO: 26764 - protein, 57 aa, Artificial Sequence; identical to SEQ ID NO: 26752
  Synthetic

SEQ ID NO: 26765 - protein, 56 aa, Artificial Sequence; identical to SEQ ID NO: 25244
  Synthetic

SEQ ID NO: 26766 - protein, 56 aa, Artificial Sequence
  Synthetic
DEEVLKKLAEIVRRVKEENRKVNEEVEKRLRELEEENKKVIEDLKSTVEELVERLR

SEQ ID NO: 26767 - protein, 56 aa, Artificial Sequence; identical to SEQ ID NO: 26766
  Synthetic

SEQ ID NO: 26768 - protein, 55 aa, Artificial Sequence
  Synthetic
DKLLKEARDLIREIEKRLEELLKRVEKLTEDAKRDLERSNREHKELADRIKETAR

SEQ ID NO: 26769 - protein, 56 aa, Artificial Sequence
  Synthetic
DKDSARELERIVKENAELAERVFREVEKIVRENTKLAEDSVRELKRLVEELKKRAK

SEQ ID NO: 26770 - protein, 57 aa, Artificial Sequence; identical to SEQ ID NO: 26745
  Synthetic

SEQ ID NO: 26771 - protein, 57 aa, Artificial Sequence; identical to SEQ ID NO: 26759
  Synthetic

SEQ ID NO: 26772 - protein, 56 aa, Artificial Sequence; identical to SEQ ID NO: 16914
  Synthetic

SEQ ID NO: 26773 - protein, 57 aa, Artificial Sequence
  Synthetic
DEEVLRTLEEIIRRLTKELEDVLREYERELRRLEEENKRVIDKTEEEIRRLADRLRR

SEQ ID NO: 26774 - protein, 57 aa, Artificial Sequence
  Synthetic
DERILRELEERVKELEKEAREILKRSEDETDKLREKAERILEDLERANRRTMDEARR

SEQ ID NO: 26775 - protein, 56 aa, Artificial Sequence; identical to SEQ ID NO: 26751
  Synthetic

SEQ ID NO: 26776 - protein, 58 aa, Artificial Sequence
  Synthetic
LPEEVLRELEELLKESEERIKRIEEEIKKIIDKSREDIKRVLEEIERLNAKAADDLRK

SEQ ID NO: 26777 - protein, 57 aa, Artificial Sequence; identical to SEQ ID NO: 26752
  Synthetic

SEQ ID NO: 26778 - protein, 56 aa, Artificial Sequence; identical to SEQ ID NO: 26766
  Synthetic

SEQ ID NO: 26779 - protein, 55 aa, Artificial Sequence; identical to SEQ ID NO: 26768
  Synthetic

SEQ ID NO: 26780 - protein, 57 aa, Artificial Sequence; identical to SEQ ID NO: 26773
  Synthetic

SEQ ID NO: 26781 - protein, 56 aa, Artificial Sequence
  Synthetic
DRRIEKVLKEIEEKIREVIKEWERVHREVEELLKRLIDENRKVLDEIRKLLEEKSK

SEQ ID NO: 26782 - protein, 57 aa, Artificial Sequence; identical to SEQ ID NO: 26774
  Synthetic

SEQ ID NO: 26783 - protein, 56 aa, Artificial Sequence; identical to SEQ ID NO: 26751
  Synthetic

SEQ ID NO: 26784 - protein, 56 aa, Artificial Sequence; identical to SEQ ID NO: 26766
  Synthetic

SEQ ID NO: 26785 - protein, 57 aa, Artificial Sequence; identical to SEQ ID NO: 26745
  Synthetic

SEQ ID NO: 26786 - protein, 56 aa, Artificial Sequence; identical to SEQ ID NO: 26781
  Synthetic

SEQ ID NO: 26787 - protein, 57 aa, Artificial Sequence
  Synthetic
TLRELARSIRKLSAENKERLKELLRELKKLSDENKERIKKLLSDAEKIIEDVARRAK

SEQ ID NO: 26788 - protein, 57 aa, Artificial Sequence; identical to SEQ ID NO: 26774
  Synthetic

SEQ ID NO: 26789 - protein, 58 aa, Artificial Sequence
  Synthetic
EKLKELRDVIAEVAKRIDELDEYTRESIRRAKKEIERLNRETKKVIEEVVKRIEEERK

SEQ ID NO: 26790 - protein, 56 aa, Artificial Sequence
  Synthetic
DERVREELKKLLTRVEEEHRKVLETDKKILKEAHKESKEVNDRDRELLERLEESVR

SEQ ID NO: 26791 - protein, 57 aa, Artificial Sequence; identical to SEQ ID NO: 26752
  Synthetic

SEQ ID NO: 26792 - protein, 57 aa, Artificial Sequence
  Synthetic
TVKRLLDELRELLERLKRTIEELLKRNRDLLADAEEKARRLLEENRKLLKAARDTAT

SEQ ID NO: 26793 - protein, 56 aa, Artificial Sequence; identical to SEQ ID NO: 26766
  Synthetic

SEQ ID NO: 26794 - protein, 57 aa, Artificial Sequence; identical to SEQ ID NO: 26745
  Synthetic

SEQ ID NO: 26795 - protein, 57 aa, Artificial Sequence; identical to SEQ ID NO: 26774
  Synthetic

SEQ ID NO: 26796 - protein, 57 aa, Artificial Sequence; identical to SEQ ID NO: 26761
  Synthetic

SEQ ID NO: 26797 - protein, 58 aa, Artificial Sequence
  Synthetic
EAAREIIKRLREVNKRTKEKLDELIKHSEEVLERVKRLIDELRKHSEEVLEDLRRRAK

SEQ ID NO: 26798 - protein, 58 aa, Artificial Sequence; identical to SEQ ID NO: 26789
  Synthetic

SEQ ID NO: 26799 - protein, 58 aa, Artificial Sequence
  Synthetic
ELLRRIKKLLDEIKKAIEDSSREIKRLLEESERVMKRSSEDIKRTLDDTRRVVEEVRR

SEQ ID NO: 26800 - protein, 55 aa, Artificial Sequence
  Synthetic
SKAIKDVRDIVKKVKDELKEWRDRNKELVDRLSEELKEWLKDVERVLKELTDKDR

SEQ ID NO: 26801 - protein, 56 aa, Artificial Sequence; identical to SEQ ID NO: 26790
  Synthetic

SEQ ID NO: 26802 - protein, 57 aa, Artificial Sequence
  Synthetic
DIDKLLKELRDLVEKIKKDLKELLERYEEIVRRIKELLKDLNREAEEVVRRLKEELR

SEQ ID NO: 26803 - protein, 57 aa, Artificial Sequence; identical to SEQ ID NO: 26752
  Synthetic

SEQ ID NO: 26804 - protein, 56 aa, Artificial Sequence; identical to SEQ ID NO: 26766
  Synthetic

SEQ ID NO: 26805 - protein, 58 aa, Artificial Sequence
  Synthetic
EREEELKEVADRVKEKLDRLNRENEKSSEELKRELDKINDENRETSERLKREIDETTR

SEQ ID NO: 26806 - protein, 57 aa, Artificial Sequence; identical to SEQ ID NO: 26745
  Synthetic

SEQ ID NO: 26807 - protein, 57 aa, Artificial Sequence; identical to SEQ ID NO: 26745
  Synthetic

SEQ ID NO: 26808 - protein, 57 aa, Artificial Sequence
  Synthetic
TKDLLDENSKRSNEISREVKKDLERTVRENKKIVDEVAKALEDTVDKNRRIVEEVTT

SEQ ID NO: 26809 - protein, 56 aa, Artificial Sequence; identical to SEQ ID NO: 16914
  Synthetic

SEQ ID NO: 26810 - protein, 56 aa, Artificial Sequence; identical to SEQ ID NO: 26781
  Synthetic

SEQ ID NO: 26811 - protein, 58 aa, Artificial Sequence; identical to SEQ ID NO: 26799
  Synthetic

SEQ ID NO: 26812 - protein, 56 aa, Artificial Sequence; identical to SEQ ID NO: 26751
  Synthetic

SEQ ID NO: 26813 - protein, 57 aa, Artificial Sequence; identical to SEQ ID NO: 26802
  Synthetic

SEQ ID NO: 26814 - protein, 57 aa, Artificial Sequence; identical to SEQ ID NO: 26752
  Synthetic

SEQ ID NO: 26815 - protein, 56 aa, Artificial Sequence; identical to SEQ ID NO: 26766
  Synthetic

SEQ ID NO: 26816 - protein, 56 aa, Artificial Sequence; identical to SEQ ID NO: 26766
  Synthetic

SEQ ID NO: 26817 - protein, 57 aa, Artificial Sequence; identical to SEQ ID NO: 26745
  Synthetic

SEQ ID NO: 26818 - protein, 56 aa, Artificial Sequence
  Synthetic
SEELREELKKLERKIEKVAKEIHDHDKEVTERLEDLLRRITEHARKSDREIEETAR

SEQ ID NO: 26819 - protein, 56 aa, Artificial Sequence; identical to SEQ ID NO: 26781
  Synthetic

SEQ ID NO: 26820 - protein, 57 aa, Artificial Sequence; identical to SEQ ID NO: 26761
  Synthetic

SEQ ID NO: 26821 - protein, 58 aa, Artificial Sequence; identical to SEQ ID NO: 26789
  Synthetic

SEQ ID NO: 26822 - protein, 58 aa, Artificial Sequence; identical to SEQ ID NO: 26799
  Synthetic

SEQ ID NO: 26823 - protein, 57 aa, Artificial Sequence; identical to SEQ ID NO: 26802
  Synthetic

SEQ ID NO: 26824 - protein, 58 aa, Artificial Sequence
  Synthetic
EAKKKLDEVLERAKRTIDRLLETSDRSLEKVEADLRRLNEELDRSLERAERTIRELAK

SEQ ID NO: 26825 - protein, 56 aa, Artificial Sequence; identical to SEQ ID NO: 26766
  Synthetic

SEQ ID NO: 26826 - protein, 56 aa, Artificial Sequence; identical to SEQ ID NO: 26766
  Synthetic

SEQ ID NO: 26827 - protein, 56 aa, Artificial Sequence; identical to SEQ ID NO: 26781
  Synthetic

SEQ ID NO: 26828 - protein, 57 aa, Artificial Sequence; identical to SEQ ID NO: 26774
  Synthetic

SEQ ID NO: 26829 - protein, 57 aa, Artificial Sequence
  Synthetic
DLKRVEERAREVSRRNEESMRRVKEDADRVSEANKEVLDRVREEVKRLIEEVRETLR

SEQ ID NO: 26830 - protein, 58 aa, Artificial Sequence; identical to SEQ ID NO: 26789
  Synthetic

SEQ ID NO: 26831 - protein, 58 aa, Artificial Sequence; identical to SEQ ID NO: 26799
  Synthetic

SEQ ID NO: 26832 - protein, 58 aa, Artificial Sequence; identical to SEQ ID NO: 26799
  Synthetic

SEQ ID NO: 26833 - protein, 58 aa, Artificial Sequence; identical to SEQ ID NO: 26776
  Synthetic

SEQ ID NO: 26834 - protein, 58 aa, Artificial Sequence; identical to SEQ ID NO: 26824
  Synthetic

SEQ ID NO: 26835 - protein, 56 aa, Artificial Sequence; identical to SEQ ID NO: 26766
  Synthetic

SEQ ID NO: 26836 - protein, 55 aa, Artificial Sequence; identical to SEQ ID NO: 26768
  Synthetic

SEQ ID NO: 26837 - protein, 55 aa, Artificial Sequence; identical to SEQ ID NO: 26768
  Synthetic

SEQ ID NO: 26838 - protein, 58 aa, Artificial Sequence
  Synthetic
DIVRKIERIVETIEREVRESVKKVEEIARDIRRKVDESVKNVEKLLRDVDKKARDRKK

SEQ ID NO: 26839 - protein, 55 aa, Artificial Sequence
  Synthetic
DEIKRIVDEVRERLKRIVDENAKIVEDARRALEKIVKENEEILRRLKKELRELRK

SEQ ID NO: 26840 - protein, 56 aa, Artificial Sequence; identical to SEQ ID NO: 26781
  Synthetic

SEQ ID NO: 26841 - protein, 57 aa, Artificial Sequence; identical to SEQ ID NO: 26829
  Synthetic

SEQ ID NO: 26842 - protein, 57 aa, Artificial Sequence; identical to SEQ ID NO: 26761
  Synthetic

SEQ ID NO: 26843 - protein, 57 aa, Artificial Sequence
  Synthetic
DAETIERVVRELLEENKEVLRKTEEAVKRSTETNKRLLEASKEVADRLRERIKEAAK

SEQ ID NO: 26844 - protein, 58 aa, Artificial Sequence; identical to SEQ ID NO: 26789
  Synthetic

SEQ ID NO: 26845 - protein, 58 aa, Artificial Sequence; identical to SEQ ID NO: 26799
  Synthetic

SEQ ID NO: 26846 - protein, 55 aa, Artificial Sequence
  Synthetic
DEVVERAERISEENKRRVEDVARKSKELVEDVRRHSEEVVRRVEELVKEVEERVR

SEQ ID NO: 26847 - protein, 58 aa, Artificial Sequence; identical to SEQ ID NO: 26824
  Synthetic

SEQ ID NO: 26848 - protein, 57 aa, Artificial Sequence
  Synthetic
TAERARETLKRLLDENRDRSKKVKEEIRRILEDLTRTTERVKREIAKLLKELEDTAR

SEQ ID NO: 26849 - protein, 58 aa, Artificial Sequence; identical to SEQ ID NO: 25262
  Synthetic

SEQ ID NO: 26850 - protein, 57 aa, Artificial Sequence; identical to SEQ ID NO: 26774
  Synthetic

SEQ ID NO: 26851 - protein, 57 aa, Artificial Sequence; identical to SEQ ID NO: 26761
  Synthetic

SEQ ID NO: 26852 - protein, 58 aa, Artificial Sequence
  Synthetic
DKARKVAEVAEKVLRDIDKLDRESKEAFRATNEEIAKLDEDTARVAERVKKAIEDLAK

SEQ ID NO: 26853 - protein, 58 aa, Artificial Sequence; identical to SEQ ID NO: 26789
  Synthetic

SEQ ID NO: 26854 - protein, 58 aa, Artificial Sequence; identical to SEQ ID NO: 26799
  Synthetic

SEQ ID NO: 26855 - protein, 58 aa, Artificial Sequence
  Synthetic
DKVERVVREVEKLHEEDRKRLEESTRSVRKLLEELKRELEKSTRSVKALVDELRERVR

SEQ ID NO: 26856 - protein, 55 aa, Artificial Sequence; identical to SEQ ID NO: 26846
  Synthetic

SEQ ID NO: 26857 - protein, 58 aa, Artificial Sequence; identical to SEQ ID NO: 26824
  Synthetic

SEQ ID NO: 26858 - protein, 57 aa, Artificial Sequence; identical to SEQ ID NO: 26848
  Synthetic

SEQ ID NO: 26859 - protein, 57 aa, Artificial Sequence; identical to SEQ ID NO: 26774
  Synthetic

SEQ ID NO: 26860 - protein, 57 aa, Artificial Sequence; identical to SEQ ID NO: 26774
  Synthetic

SEQ ID NO: 26861 - protein, 57 aa, Artificial Sequence; identical to SEQ ID NO: 26829
  Synthetic

SEQ ID NO: 26862 - protein, 58 aa, Artificial Sequence; identical to SEQ ID NO: 26852
  Synthetic

SEQ ID NO: 26863 - protein, 58 aa, Artificial Sequence; identical to SEQ ID NO: 26799
  Synthetic

SEQ ID NO: 26864 - protein, 55 aa, Artificial Sequence; identical to SEQ ID NO: 26800
  Synthetic

SEQ ID NO: 26865 - protein, 58 aa, Artificial Sequence; identical to SEQ ID NO: 26855
  Synthetic

SEQ ID NO: 26866 - protein, 57 aa, Artificial Sequence; identical to SEQ ID NO: 26802
  Synthetic

SEQ ID NO: 26867 - protein, 58 aa, Artificial Sequence; identical to SEQ ID NO: 26824
  Synthetic

SEQ ID NO: 26868 - protein, 55 aa, Artificial Sequence; identical to SEQ ID NO: 26768
  Synthetic

SEQ ID NO: 26869 - protein, 57 aa, Artificial Sequence; identical to SEQ ID NO: 26848
  Synthetic

SEQ ID NO: 26870 - protein, 55 aa, Artificial Sequence; identical to SEQ ID NO: 26839
  Synthetic

SEQ ID NO: 26871 - protein, 55 aa, Artificial Sequence
  Synthetic
DRIEEELKRLIDTLREKNREVEKRARDSNRDLKRTNDEIAKEVRELIKKLREDLK

SEQ ID NO: 26872 - protein, 57 aa, Artificial Sequence; identical to SEQ ID NO: 26774
  Synthetic

SEQ ID NO: 26873 - protein, 57 aa, Artificial Sequence; identical to SEQ ID NO: 26843
  Synthetic

SEQ ID NO: 26874 - protein, 58 aa, Artificial Sequence; identical to SEQ ID NO: 26852
  Synthetic

SEQ ID NO: 26875 - protein, 58 aa, Artificial Sequence; identical to SEQ ID NO: 26855
  Synthetic

SEQ ID NO: 26876 - protein, 57 aa, Artificial Sequence
  Synthetic
DIERILRELEAVLKKLTDESERLNREVERVSRDTKKKSKELNEELKAVLDEVKRKAD

SEQ ID NO: 26877 - protein, 55 aa, Artificial Sequence; identical to SEQ ID NO: 26846
  Synthetic

SEQ ID NO: 26878 - protein, 58 aa, Artificial Sequence; identical to SEQ ID NO: 26824
  Synthetic

SEQ ID NO: 26879 - protein, 57 aa, Artificial Sequence; identical to SEQ ID NO: 26848
  Synthetic

SEQ ID NO: 26880 - protein, 55 aa, Artificial Sequence; identical to SEQ ID NO: 26839
  Synthetic

SEQ ID NO: 26881 - protein, 56 aa, Artificial Sequence; identical to SEQ ID NO: 26781
  Synthetic

SEQ ID NO: 26882 - protein, 57 aa, Artificial Sequence; identical to SEQ ID NO: 26829
  Synthetic

SEQ ID NO: 26883 - protein, 57 aa, Artificial Sequence; identical to SEQ ID NO: 26843
  Synthetic

SEQ ID NO: 26884 - protein, 58 aa, Artificial Sequence; identical to SEQ ID NO: 26852
  Synthetic

SEQ ID NO: 26885 - protein, 58 aa, Artificial Sequence; identical to SEQ ID NO: 26799
  Synthetic

SEQ ID NO: 26886 - protein, 58 aa, Artificial Sequence; identical to SEQ ID NO: 26855
  Synthetic

SEQ ID NO: 26887 - protein, 58 aa, Artificial Sequence; identical to SEQ ID NO: 26824
  Synthetic

SEQ ID NO: 26888 - protein, 57 aa, Artificial Sequence; identical to SEQ ID NO: 26848
  Synthetic

SEQ ID NO: 26889 - protein, 55 aa, Artificial Sequence; identical to SEQ ID NO: 26839
  Synthetic

SEQ ID NO: 26890 - protein, 58 aa, Artificial Sequence; identical to SEQ ID NO: 26852
  Synthetic

SEQ ID NO: 26891 - protein, 58 aa, Artificial Sequence
  Synthetic
DEVTKVKKVADDVLAEIKKLDDETRRVIEDTNKKIADLDKATRDVVRKVLEEVKKLEK

SEQ ID NO: 26892 - protein, 57 aa, Artificial Sequence; identical to SEQ ID NO: 26802
  Synthetic

SEQ ID NO: 26893 - protein, 57 aa, Artificial Sequence; identical to SEQ ID NO: 26848
  Synthetic

SEQ ID NO: 26894 - protein, 55 aa, Artificial Sequence; identical to SEQ ID NO: 26839
  Synthetic

SEQ ID NO: 26895 - protein, 58 aa, Artificial Sequence
  Synthetic
RLVREVEDLVRRLVRRSEKSNEEVKRTVEELVRRMEESNDRVRDLVRRLVEELKRAVD

SEQ ID NO: 26896 - protein, 58 aa, Artificial Sequence; identical to SEQ ID NO: 26852
  Synthetic

SEQ ID NO: 26897 - protein, 58 aa, Artificial Sequence; identical to SEQ ID NO: 26824
  Synthetic

SEQ ID NO: 26898 - protein, 58 aa, Artificial Sequence; identical to SEQ ID NO: 26895
  Synthetic

SEQ ID NO: 26899 - protein, 58 aa, Artificial Sequence; identical to SEQ ID NO: 26852
  Synthetic

SEQ ID NO: 26900 - protein, 58 aa, Artificial Sequence; identical to SEQ ID NO: 26891
  Synthetic

SEQ ID NO: 26901 - protein, 57 aa, Artificial Sequence; identical to SEQ ID NO: 26848
  Synthetic

SEQ ID NO: 26902 - protein, 57 aa, Artificial Sequence; identical to SEQ ID NO: 26829
  Synthetic

SEQ ID NO: 26903 - protein, 58 aa, Artificial Sequence; identical to SEQ ID NO: 26852
  Synthetic

SEQ ID NO: 26904 - protein, 58 aa, Artificial Sequence; identical to SEQ ID NO: 26891
  Synthetic

SEQ ID NO: 26905 - protein, 58 aa, Artificial Sequence; identical to SEQ ID NO: 26855
  Synthetic

SEQ ID NO: 26906 - protein, 58 aa, Artificial Sequence; identical to SEQ ID NO: 26824
  Synthetic

SEQ ID NO: 26907 - protein, 57 aa, Artificial Sequence; identical to SEQ ID NO: 26848
  Synthetic

SEQ ID NO: 26908 - protein, 57 aa, Artificial Sequence; identical to SEQ ID NO: 26848
  Synthetic

SEQ ID NO: 26909 - protein, 58 aa, Artificial Sequence; identical to SEQ ID NO: 26852
  Synthetic

SEQ ID NO: 26910 - protein, 58 aa, Artificial Sequence; identical to SEQ ID NO: 26891
  Synthetic

SEQ ID NO: 26911 - protein, 58 aa, Artificial Sequence; identical to SEQ ID NO: 26855
  Synthetic

SEQ ID NO: 26912 - protein, 57 aa, Artificial Sequence; identical to SEQ ID NO: 26848
  Synthetic

SEQ ID NO: 26913 - protein, 58 aa, Artificial Sequence; identical to SEQ ID NO: 26852
  Synthetic

SEQ ID NO: 26914 - protein, 58 aa, Artificial Sequence; identical to SEQ ID NO: 26895
  Synthetic

SEQ ID NO: 26915 - protein, 58 aa, Artificial Sequence
  Synthetic
SESDEVIRDLARLLDELARHVDDSVRRMDEVVKRSTREADELAKRLDELVKEVEKKPG

SEQ ID NO: 26916 - protein, 58 aa, Artificial Sequence
  Synthetic
SRAETVLKEVTDKIKKLADSSDELLRRNKENIDELKKSSEELLRRLTKAIEEIEKGSV

SEQ ID NO: 26917 - protein, 58 aa, Artificial Sequence
  Synthetic
SVDEVLKEIEDALRRLKEEVERVLKENEDELRRLEEEVRRVLKEDEELLESLKRGVGE

SEQ ID NO: 26918 - protein, 58 aa, Artificial Sequence
  Synthetic
SEVDEIIKELERLLAEIARENERIIRESRKLADEVRKRNEDAIRKLEELVARLADAVR

SEQ ID NO: 26919 - protein, 58 aa, Artificial Sequence
  Synthetic
SEVDDVLRRLEELIKTLEDINAKSLEDIKKLIDDLAKILEDALRKHEKLIRELREAKK

SEQ ID NO: 26920 - protein, 58 aa, Artificial Sequence; identical to SEQ ID NO: 26919
  Synthetic

SEQ ID NO: 26921 - protein, 58 aa, Artificial Sequence; identical to SEQ ID NO: 26916
  Synthetic

SEQ ID NO: 26922 - protein, 58 aa, Artificial Sequence
  Synthetic
KEVEDAVKELEDLLRANEDKTRSIVEDMRASNKDLEDHSRASEEEVRKLLDDLRRAGV

SEQ ID NO: 26923 - protein, 58 aa, Artificial Sequence; identical to SEQ ID NO: 26919
  Synthetic

SEQ ID NO: 26924 - protein, 58 aa, Artificial Sequence; identical to SEQ ID NO: 26915
  Synthetic

SEQ ID NO: 26925 - protein, 58 aa, Artificial Sequence
  Synthetic
SESDDVIRKLRELLEELRTHVEKSIRDLRKILEDSTRHAKRSIEELERLLEEVRKKPG

SEQ ID NO: 26926 - protein, 58 aa, Artificial Sequence; identical to SEQ ID NO: 26916
  Synthetic

SEQ ID NO: 26927 - protein, 58 aa, Artificial Sequence
  Synthetic
SEAEKAKETIDRLADRVRKLLEEIKRSLDDSRRKSKETVEENEKTLDRMRKEVDAAKR

SEQ ID NO: 26928 - protein, 58 aa, Artificial Sequence; identical to SEQ ID NO: 26927
  Synthetic

SEQ ID NO: 26929 - protein, 58 aa, Artificial Sequence
  Synthetic
SEVEELIKRLAKVLKELVDKVRKVIEDTKELLERLKRRSEDHIRKLREVLKEAKDQPI

SEQ ID NO: 26930 - protein, 58 aa, Artificial Sequence
  Synthetic
SELEEIEKKVRELTKRHRELVERVRKTVKELIETNRRLLETLTERIKRVLEEVRDLER

SEQ ID NO: 26931 - protein, 58 aa, Artificial Sequence
  Synthetic
SSEERLRAVIEDLKRLAEESRKRHKELIDELAKAVERIERRHKKLLDEIKAVVDDIRR

SEQ ID NO: 26932 - protein, 58 aa, Artificial Sequence
  Synthetic
DEIRKVVKEITDLLKASNDKNRKVVEEIRDLLRKSKKLADELVERLRALVEDLRRRID

SEQ ID NO: 26933 - protein, 58 aa, Artificial Sequence
  Synthetic
STAETVAEEVERVLKHSDDLIKEVEDVNRRVEEEIKRVIRELEEENERLVAEVRKGVK

SEQ ID NO: 26934 - protein, 58 aa, Artificial Sequence; identical to SEQ ID NO: 26918
  Synthetic

SEQ ID NO: 26935 - protein, 58 aa, Artificial Sequence
  Synthetic
SEIDEVLTRLRKISKDLNETSDRVNERARKIIDDIKKESKRVNDEAREIVERLKREID

SEQ ID NO: 26936 - protein, 58 aa, Artificial Sequence
  Synthetic
SEDEDLDRVAEKLAREHKKSVEEIKRVLKSADEESKKLVRDTERVIEEIKREVEEARR

SEQ ID NO: 26937 - protein, 58 aa, Artificial Sequence
  Synthetic
SSVEELLERLRRISEENKRRIEKLLREVEKVLRELKDRHRKLLKRVEEIIRKVKEEIK

SEQ ID NO: 26938 - protein, 58 aa, Artificial Sequence; identical to SEQ ID NO: 25117
  Synthetic

SEQ ID NO: 26939 - protein, 58 aa, Artificial Sequence; identical to SEQ ID NO: 26915
  Synthetic

SEQ ID NO: 26940 - protein, 58 aa, Artificial Sequence; identical to SEQ ID NO: 26922
  Synthetic

SEQ ID NO: 26941 - protein, 58 aa, Artificial Sequence; identical to SEQ ID NO: 26932
  Synthetic

SEQ ID NO: 26942 - protein, 58 aa, Artificial Sequence
  Synthetic
SRVEEIIEDLRRLLEEIRKENEDSIRRSKELLDRVKEINDTIIAELERLLKDIEKEVR

SEQ ID NO: 26943 - protein, 58 aa, Artificial Sequence; identical to SEQ ID NO: 26942
  Synthetic

SEQ ID NO: 26944 - protein, 58 aa, Artificial Sequence; identical to SEQ ID NO: 26919
  Synthetic

SEQ ID NO: 26945 - protein, 58 aa, Artificial Sequence
  Synthetic
SKLEEVEKAVRKVIEDSRRVNEEVNRRSEEVVRELEKVHREVNDASRRVVEKARRVLK

SEQ ID NO: 26946 - protein, 58 aa, Artificial Sequence; identical to SEQ ID NO: 26915
  Synthetic

SEQ ID NO: 26947 - protein, 58 aa, Artificial Sequence; identical to SEQ ID NO: 26915
  Synthetic

SEQ ID NO: 26948 - protein, 58 aa, Artificial Sequence; identical to SEQ ID NO: 26925
  Synthetic

SEQ ID NO: 26949 - protein, 58 aa, Artificial Sequence
  Synthetic
DEVRELLERNRRLLEEIKKTVKDLIRANEELLKRIEDDAKRLIDRNEELLDELEKGLS

SEQ ID NO: 26950 - protein, 58 aa, Artificial Sequence; identical to SEQ ID NO: 26932
  Synthetic

SEQ ID NO: 26951 - protein, 58 aa, Artificial Sequence; identical to SEQ ID NO: 26916
  Synthetic

SEQ ID NO: 26952 - protein, 58 aa, Artificial Sequence
  Synthetic
DEEEDLERAIKKLLDENRELLKRIAEELRRLLEELRRLTEESADRLRRLLKELKDRGV

SEQ ID NO: 26953 - protein, 58 aa, Artificial Sequence; identical to SEQ ID NO: 26932
  Synthetic

SEQ ID NO: 26954 - protein, 58 aa, Artificial Sequence
  Synthetic
SKEDRLREELKKLLARLAEEIERLKRALEESNKDLKRTIDASEKHLRDVNEDVKRGGV

SEQ ID NO: 26955 - protein, 58 aa, Artificial Sequence; identical to SEQ ID NO: 26915
  Synthetic

SEQ ID NO: 26956 - protein, 58 aa, Artificial Sequence; identical to SEQ ID NO: 26915
  Synthetic

SEQ ID NO: 26957 - protein, 58 aa, Artificial Sequence; identical to SEQ ID NO: 26925
  Synthetic

SEQ ID NO: 26958 - protein, 58 aa, Artificial Sequence; identical to SEQ ID NO: 26942
  Synthetic

SEQ ID NO: 26959 - protein, 58 aa, Artificial Sequence; identical to SEQ ID NO: 26918
  Synthetic

SEQ ID NO: 26960 - protein, 58 aa, Artificial Sequence; identical to SEQ ID NO: 26937
  Synthetic

SEQ ID NO: 26961 - protein, 58 aa, Artificial Sequence; identical to SEQ ID NO: 25261
  Synthetic

SEQ ID NO: 26962 - protein, 58 aa, Artificial Sequence; identical to SEQ ID NO: 26915
  Synthetic

SEQ ID NO: 26963 - protein, 58 aa, Artificial Sequence; identical to SEQ ID NO: 26925
  Synthetic

SEQ ID NO: 26964 - protein, 58 aa, Artificial Sequence; identical to SEQ ID NO: 26916
  Synthetic

SEQ ID NO: 26965 - protein, 58 aa, Artificial Sequence; identical to SEQ ID NO: 26949
  Synthetic

SEQ ID NO: 26966 - protein, 58 aa, Artificial Sequence
  Synthetic
STEEVLDEIRKLHKTLTEDIKRVLREIEELHRRTIEENKEVLDKIAEDYKRVIDDVRT

SEQ ID NO: 26967 - protein, 58 aa, Artificial Sequence
  Synthetic
SEIEKILKEIEDLARRDEEVSKKIVEDIRRLAKEVEDTSRDIVRKIEELAKRVLDRLR

SEQ ID NO: 26968 - protein, 58 aa, Artificial Sequence
  Synthetic
SEAERLEARARELLRANEELMDDLRAKAEELLKRNDRLVKEIEKKVREVLAAIEELKR

SEQ ID NO: 26969 - protein, 58 aa, Artificial Sequence
  Synthetic
DDLERAREEVADLIRKHEEKTRRILEESRRLNERHRELSARILDEIRKLAERIEELIK

SEQ ID NO: 26970 - protein, 58 aa, Artificial Sequence; identical to SEQ ID NO: 26952
  Synthetic

SEQ ID NO: 26971 - protein, 58 aa, Artificial Sequence; identical to SEQ ID NO: 26932
  Synthetic

SEQ ID NO: 26972 - protein, 58 aa, Artificial Sequence; identical to SEQ ID NO: 26932
  Synthetic

SEQ ID NO: 26973 - protein, 58 aa, Artificial Sequence
  Synthetic
STAETVEKKVEEVIRENEKSMRESEEKVDRSTKRIEDVLRRLEETIRKTSDDIAKGVK

SEQ ID NO: 26974 - protein, 58 aa, Artificial Sequence; identical to SEQ ID NO: 26942
  Synthetic

SEQ ID NO: 26975 - protein, 58 aa, Artificial Sequence; identical to SEQ ID NO: 26942
  Synthetic

SEQ ID NO: 26976 - protein, 58 aa, Artificial Sequence
  Synthetic
REVEEMIKELEELLKDLKEKNERASKRNRELVRRLEEENKRVIEELKKLVKELEDLVR

SEQ ID NO: 26977 - protein, 58 aa, Artificial Sequence; identical to SEQ ID NO: 26919
  Synthetic

SEQ ID NO: 26978 - protein, 58 aa, Artificial Sequence; identical to SEQ ID NO: 26945
  Synthetic

SEQ ID NO: 26979 - protein, 58 aa, Artificial Sequence
  Synthetic
DEVEDVLRKIEKILDDHRKRIEKNSRDMARIIDEHRRKVEENSREMKKLVDDLKKAVD

SEQ ID NO: 26980 - protein, 58 aa, Artificial Sequence; identical to SEQ ID NO: 26937
  Synthetic

SEQ ID NO: 26981 - protein, 58 aa, Artificial Sequence
  Synthetic
DEVEKVLEEIKRALDDLRKKVEESKREIKEALKAVEKHTRDSDTANKRTLAEIERGVK

SEQ ID NO: 26982 - protein, 58 aa, Artificial Sequence; identical to SEQ ID NO: 26915
  Synthetic

SEQ ID NO: 26983 - protein, 58 aa, Artificial Sequence; identical to SEQ ID NO: 26922
  Synthetic

SEQ ID NO: 26984 - protein, 58 aa, Artificial Sequence; identical to SEQ ID NO: 26932
  Synthetic

SEQ ID NO: 26985 - protein, 58 aa, Artificial Sequence; identical to SEQ ID NO: 26933
  Synthetic

SEQ ID NO: 26986 - protein, 58 aa, Artificial Sequence; identical to SEQ ID NO: 26942
  Synthetic

SEQ ID NO: 26987 - protein, 58 aa, Artificial Sequence; identical to SEQ ID NO: 26918
  Synthetic

SEQ ID NO: 26988 - protein, 58 aa, Artificial Sequence; identical to SEQ ID NO: 26919
  Synthetic

SEQ ID NO: 26989 - protein, 58 aa, Artificial Sequence; identical to SEQ ID NO: 26945
  Synthetic

SEQ ID NO: 26990 - protein, 58 aa, Artificial Sequence
  Synthetic
SAEEVKEELKRIATKLKEEIKENIRRLEESVEKIAKELAENIKRLEDILRDVKRGLRD

SEQ ID NO: 26991 - protein, 58 aa, Artificial Sequence
  Synthetic
SDVDRVLEEIRKLLEDLKRHSEKVSEENEDLLRANTELNKRVSEDNERLLEELKRLRE

SEQ ID NO: 26992 - protein, 58 aa, Artificial Sequence; identical to SEQ ID NO: 26979
  Synthetic

SEQ ID NO: 26993 - protein, 58 aa, Artificial Sequence; identical to SEQ ID NO: 26937
  Synthetic

SEQ ID NO: 26994 - protein, 58 aa, Artificial Sequence
  Synthetic
DREREVKKRLDEVRERIERLLRRVEEESRRVAEEIRRLIEEVRRRNKKVTEEIRELLK

SEQ ID NO: 26995 - protein, 58 aa, Artificial Sequence; identical to SEQ ID NO: 26916
  Synthetic

SEQ ID NO: 26996 - protein, 58 aa, Artificial Sequence; identical to SEQ ID NO: 26967
  Synthetic

SEQ ID NO: 26997 - protein, 58 aa, Artificial Sequence; identical to SEQ ID NO: 26927
  Synthetic

SEQ ID NO: 26998 - protein, 58 aa, Artificial Sequence; identical to SEQ ID NO: 26929
  Synthetic

SEQ ID NO: 26999 - protein, 58 aa, Artificial Sequence; identical to SEQ ID NO: 26932
  Synthetic

SEQ ID NO: 27000 - protein, 58 aa, Artificial Sequence; identical to SEQ ID NO: 26932
  Synthetic

SEQ ID NO: 27001 - protein, 58 aa, Artificial Sequence; identical to SEQ ID NO: 26973
  Synthetic

SEQ ID NO: 27002 - protein, 58 aa, Artificial Sequence; identical to SEQ ID NO: 26942
  Synthetic

SEQ ID NO: 27003 - protein, 58 aa, Artificial Sequence; identical to SEQ ID NO: 26976
  Synthetic

SEQ ID NO: 27004 - protein, 58 aa, Artificial Sequence
  Synthetic
DAVEEAEKLIRKVIADSEKLLRDLADLNAKSIRRSEKLVEDDRRANEDVIRKLEELRR

SEQ ID NO: 27005 - protein, 58 aa, Artificial Sequence; identical to SEQ ID NO: 26919
  Synthetic

SEQ ID NO: 27006 - protein, 58 aa, Artificial Sequence
  Synthetic
SEIERVKKRLEELLAEVEESTRRLEERLKRLLEEAKRSSEEVEKELRRLLEAVRRGLS

SEQ ID NO: 27007 - protein, 58 aa, Artificial Sequence; identical to SEQ ID NO: 26991
  Synthetic

SEQ ID NO: 27008 - protein, 58 aa, Artificial Sequence; identical to SEQ ID NO: 26979
  Synthetic

SEQ ID NO: 27009 - protein, 58 aa, Artificial Sequence; identical to SEQ ID NO: 26915
  Synthetic

SEQ ID NO: 27010 - protein, 58 aa, Artificial Sequence; identical to SEQ ID NO: 26916
  Synthetic

SEQ ID NO: 27011 - protein, 58 aa, Artificial Sequence; identical to SEQ ID NO: 26952
  Synthetic

SEQ ID NO: 27012 - protein, 58 aa, Artificial Sequence; identical to SEQ ID NO: 26932
  Synthetic

SEQ ID NO: 27013 - protein, 58 aa, Artificial Sequence; identical to SEQ ID NO: 27004
  Synthetic

SEQ ID NO: 27014 - protein, 58 aa, Artificial Sequence; identical to SEQ ID NO: 26936
  Synthetic

SEQ ID NO: 27015 - protein, 58 aa, Artificial Sequence; identical to SEQ ID NO: 26954
  Synthetic

SEQ ID NO: 27016 - protein, 36 aa, Artificial Sequence
  Synthetic
DEARKAIARVKRESKRIVEDAERLIREAAAASEKIS

SEQ ID NO: 27017 - protein, 40 aa, Artificial Sequence
  Synthetic
  MISC_FEATURE (40)..(40): C-terminal biotin
DEARKAIARVKRESKRIVEDAERLIREAAAASEKISGSGK

SEQ ID NO: 27018 - protein, 447 aa, Artificial Sequence
  Synthetic
  MISC_FEATURE (1)..(3): optional
  MISC_FEATURE (43)..(447): optional
  MISC_FEATURE (434)..(434): optional residue for biotinylation of MBP_key
MDPDEARKAIARVKRESKRIVEDAERLIREAAAASEKISREASSGLVPRGSHMKIEEGKLVIWINGDKGYNGLAEVGKKFEKDTGIKVTVEHPDKLEEKFPQVAATGDGPDIIFWAHDRFGGYAQSGLLAEITPDKAFQDKLYPFTWDAVRYNGKLIAYPIAVEALSLIYNKDLLPNPPKTWEEIPALDKELKAKGKSALMFNLQEPYFTWPLIAADGGYAFKYENGKYDIKDVGVDNAGAKAGLTFLVDLIKNKHMNADTDYSIAEAAFNKGETAMTINGPWAWSNIDTSKVNYGVTVLPTFKGQPSKPFVGVLSAGINAASPNKELAKEFLENYLLTDEGLEAVNKDKPLGAVALKSYEEELVKDPRIAATMENAQKGEIMPNIPQMSAFWYAVRTAVINAASGRQTVDEALKDAQTNSSGSGLNDIFEAQKIEWHELEHHHHHH

SEQ ID NO: 27019 - protein, 455 aa, Artificial Sequence
  Synthetic
  MISC_FEATURE (1)..(3): optional
  MISC_FEATURE (51)..(455): optional
  MISC_FEATURE (442)..(442): optional residue for biotinylation of MBP_key
MDPDEARKAIARVKRESKRIVEDAERLIREAAAASEKISREAERLIREAASSGLVPRGSHMKIEEGKLVIWINGDKGYNGLAEVGKKFEKDTGIKVTVEHPDKLEEKFPQVAATGDGPDIIFWAHDRFGGYAQSGLLAEITPDKAFQDKLYPFTWDAVRYNGKLIAYPIAVEALSLIYNKDLLPNPPKTWEEIPALDKELKAKGKSALMFNLQEPYFTWPLIAADGGYAFKYENGKYDIKDVGVDNAGAKAGLTFLVDLIKNKHMNADTDYSIAEAAFNKGETAMTINGPWAWSNIDTSKVNYGVTVLPTFKGQPSKPFVGVLSAGINAASPNKELAKEFLENYLLTDEGLEAVNKDKPLGAVALKSYEEELVKDPRIAATMENAQKGEIMPNIPQMSAFWYAVRTAVINAASGRQTVDEALKDAQTNSSGSGLNDIFEAQKIEWHELEHHHHHH

SEQ ID NO: 27020 - protein, 464 aa, Artificial Sequence
  Synthetic
  MISC_FEATURE (1)..(3): optional
  MISC_FEATURE (60)..(464): optional
  MISC_FEATURE (451)..(451): optional residue for biotinylation of MBP_key
MDPDEARKAIARVKRESKRIVEDAERLIREAAAASEKISREAERLIREAAAASEKISRESSGLVPRGSHMKIEEGKLVIWINGDKGYNGLAEVGKKFEKDTGIKVTVEHPDKLEEKFPQVAATGDGPDIIFWAHDRFGGYAQSGLLAEITPDKAFQDKLYPFTWDAVRYNGKLIAYPIAVEALSLIYNKDLLPNPPKTWEEIPALDKELKAKGKSALMFNLQEPYFTWPLIAADGGYAFKYENGKYDIKDVGVDNAGAKAGLTFLVDLIKNKHMNADTDYSIAEAAFNKGETAMTINGPWAWSNIDTSKVNYGVTVLPTFKGQPSKPFVGVLSAGINAASPNKELAKEFLENYLLTDEGLEAVNKDKPLGAVALKSYEEELVKDPRIAATMENAQKGEIMPNIPQMSAFWYAVRTAVINAASGRQTVDEALKDAQTNSSGSGLNDIFEAQKIEWHELEHHHHHH

SEQ ID NO: 27021 - protein, 456 aa, Artificial Sequence
  Synthetic
  MISC_FEATURE (1)..(400)
  MISC_FEATURE (439)..(456)
MGSSHHHHHHSSGLVPRGSHMKIEEGKLVIWINGDKGYNGLAEVGKKFEKDTGIKVTVEHPDKLEEKFPQVAATGDGPDIIFWAHDRFGGYAQSGLLAEITPDKAFQDKLYPFTWDAVRYNGKLIAYPIAVEALSLIYNKDLLPNPPKTWEEIPALDKELKAKGKSALMFNLQEPYFTWPLIAADGGYAFKYENGKYDIKDVGVDNAGAKAGLTFLVDLIKNKHMNADTDYSIAEAAFNKGETAMTINGPWAWSNIDTSKVNYGVTVLPTFKGQPSKPFVGVLSAGINAASPNKELAKEFLENYLLTDEGLEAVNKDKPLGAVALKSYEEELVKDPRIAATMENAQKGEIMPNIPQMSAFWYAVRTAVINAASGRQTVDEALKDAQTNSGSGSGENLYFQDEARKAIARVKRESKRIVEDAERLIREAAAASEKISREAERLIREAAAASEKISRE

SEQ ID NO: 27022 - protein, 445 aa, Artificial Sequence
  Synthetic
  MISC_FEATURE (1)..(1): optional
  MISC_FEATURE (58)..(445): optional
MNKEEIEKLAKEAREKLKKAEKEHKEIHDKLRKKNKKAREDLKKKADELRETNKRVNGSENLYFQGSGSGKIEEGKLVIWINGDKGYNGLAEVGKKFEKDTGIKVTVEHPDKLEEKFPQVAATGDGPDIIFWAHDRFGGYAQSGLLAEITPDKAFQDKLYPFTWDAVRYNGKLIAYPIAVEALSLIYNKDLLPNPPKTWEEIPALDKELKAKGKSALMFNLQEPYFTWPLIAADGGYAFKYENGKYDIKDVGVDNAGAKAGLTFLVDLIKNKHMNADTDYSIAEAAFNKGETAMTINGPWAWSNIDTSKVNYGVTVLPTFKGQPSKPFVGVLSAGINAASPNKELAKEFLENYLLTDEGLEAVNKDKPLGAVALKSYEEELVKDPRIAATMENAQKGEIMPNIPQMSAFWYAVRTAVINAASGRQTVDEALKDAQTNLEHHHHHH

SEQ ID NO: 27023 - protein, 445 aa, Artificial Sequence
  Synthetic
  MISC_FEATURE (1)..(1): optional
  MISC_FEATURE (58)..(445): optional
MSSEKVRRELKESLKENHKQNQKLLKDHKRAQEKLNRELEELKKKHKKTLDDIRRESGSENLYFQGSGSGKIEEGKLVIWINGDKGYNGLAEVGKKFEKDTGIKVTVEHPDKLEEKFPQVAATGDGPDIIFWAHDRFGGYAQSGLLAEITPDKAFQDKLYPFTWDAVRYNGKLIAYPIAVEALSLIYNKDLLPNPPKTWEEIPALDKELKAKGKSALMFNLQEPYFTWPLIAADGGYAFKYENGKYDIKDVGVDNAGAKAGLTFLVDLIKNKHMNADTDYSIAEAAFNKGETAMTINGPWAWSNIDTSKVNYGVTVLPTFKGQPSKPFVGVLSAGINAASPNKELAKEFLENYLLTDEGLEAVNKDKPLGAVALKSYEEELVKDPRIAATMENAQKGEIMPNIPQMSAFWYAVRTAVINAASGRQTVDEALKDAQTNLEHHHHHH

SEQ ID NO: 27024 - protein, 445 aa, Artificial Sequence
  Synthetic
  MISC_FEATURE (1)..(1): optional
  MISC_FEATURE (58)..(445): optional
MDTVKRILEELRRRFEKLAKDLDDIARKLLEDHKKHNKELKDKQRKIKKEADDAARSGSENLYFQGSGSGKIEEGKLVIWINGDKGYNGLAEVGKKFEKDTGIKVTVEHPDKLEEKFPQVAATGDGPDIIFWAHDRFGGYAQSGLLAEITPDKAFQDKLYPFTWDAVRYNGKLIAYPIAVEALSLIYNKDLLPNPPKTWEEIPALDKELKAKGKSALMFNLQEPYFTWPLIAADGGYAFKYENGKYDIKDVGVDNAGAKAGLTFLVDLIKNKHMNADTDYSIAEAAFNKGETAMTINGPWAWSNIDTSKVNYGVTVLPTFKGQPSKPFVGVLSAGINAASPNKELAKEFLENYLLTDEGLEAVNKDKPLGAVALKSYEEELVKDPRIAATMENAQKGEIMPNIPQMSAFWYAVRTAVINAASGRQTVDEALKDAQTNLEHHHHHH

SEQ ID NO: 27025 - protein, 445 aa, Artificial Sequence
  Synthetic
  MISC_FEATURE (1)..(1): optional
  MISC_FEATURE (58)..(445): optional
MDDVERRLRKANKESKKEAEELTEEAKKANEKTKEDSKELTKENRKTNKTIKDEARSGSENLYFQGSGSGKIEEGKLVIWINGDKGYNGLAEVGKKFEKDTGIKVTVEHPDKLEEKFPQVAATGDGPDIIFWAHDRFGGYAQSGLLAEITPDKAFQDKLYPFTWDAVRYNGKLIAYPIAVEALSLIYNKDLLPNPPKTWEEIPALDKELKAKGKSALMFNLQEPYFTWPLIAADGGYAFKYENGKYDIKDVGVDNAGAKAGLTFLVDLIKNKHMNADTDYSIAEAAFNKGETAMTINGPWAWSNIDTSKVNYGVTVLPTFKGQPSKPFVGVLSAGINAASPNKELAKEFLENYLLTDEGLEAVNKDKPLGAVALKSYEEELVKDPRIAATMENAQKGEIMPNIPQMSAFWYAVRTAVINAASGRQTVDEALKDAQTNLEHHHHHH

SEQ ID NO: 27026 - protein, 445 aa, Artificial Sequence
  Synthetic
  MISC_FEATURE (1)..(1): optional
  MISC_FEATURE (58)..(445): optional
MDDEERRSEKTVQDAKREIKKVEDDLQRLNEEQKKKVKKQEDENQKTLKKHKDDARSGSENLYFQGSGSGKIEEGKLVIWINGDKGYNGLAEVGKKFEKDTGIKVTVEHPDKLEEKFPQVAATGDGPDIIFWAHDRFGGYAQSGLLAEITPDKAFQDKLYPFTWDAVRYNGKLIAYPIAVEALSLIYNKDLLPNPPKTWEEIPALDKELKAKGKSALMFNLQEPYFTWPLIAADGGYAFKYENGKYDIKDVGVDNAGAKAGLTFLVDLIKNKHMNADTDYSIAEAAFNKGETAMTINGPWAWSNIDTSKVNYGVTVLPTFKGQPSKPFVGVLSAGINAASPNKELAKEFLENYLLTDEGLEAVNKDKPLGAVALKSYEEELVKDPRIAATMENAQKGEIMPNIPQMSAFWYAVRTAVINAASGRQTVDEALKDAQTNLEHHHHHH

SEQ ID NO: 27027 - protein, 456 aa, Artificial Sequence
  Synthetic
  MISC_FEATURE (1)..(400): optional
  misc_feature (443)..(443): Xaa can be any naturally occurring amino acid
  misc_feature (453)..(453): Xaa can be any naturally occurring amino acid
MGSSHHHHHHSSGLVPRGSHMKIEEGKLVIWINGDKGYNGLAEVGKKFEKDTGIKVTVEHPDKLEEKFPQVAATGDGPDIIFWAHDRFGGYAQSGLLAEITPDKAFQDKLYPFTWDAVRYNGKLIAYPIAVEALSLIYNKDLLPNPPKTWEEIPALDKELKAKGKSALMFNLQEPYFTWPLIAADGGYAFKYENGKYDIKDVGVDNAGAKAGLTFLVDLIKNKHMNADTDYSIAEAAFNKGETAMTINGPWAWSNIDTSKVNYGVTVLPTFKGQPSKPFVGVLSAGINAASPNKELAKEFLENYLLTDEGLEAVNKDKPLGAVALKSYEEELVKDPRIAATMENAQKGEIMPNIPQMSAFWYAVRTAVINAASGRQTVDEALKDAQTNSGSGSGENLYFQDEARKAIARVKRESKRIVEDAERLIREAAAASEKISREAERLXREAAAASEKXSRE

SEQ ID NO: 27028 - protein, 444 aa, Artificial Sequence
  Synthetic
  MISC_FEATURE (1)..(400): optional
  misc_feature (435)..(435): Xaa can be any naturally occurring amino acid
  misc_feature (443)..(443): Xaa can be any naturally occurring amino acid
MGSSHHHHHHSSGLVPRGSHMKIEEGKLVIWINGDKGYNGLAEVGKKFEKDTGIKVTVEHPDKLEEKFPQVAATGDGPDIIFWAHDRFGGYAQSGLLAEITPDKAFQDKLYPFTWDAVRYNGKLIAYPIAVEALSLIYNKDLLPNPPKTWEEIPALDKELKAKGKSALMFNLQEPYFTWPLIAADGGYAFKYENGKYDIKDVGVDNAGAKAGLTFLVDLIKNKHMNADTDYSIAEAAFNKGETAMTINGPWAWSNIDTSKVNYGVTVLPTFKGQPSKPFVGVLSAGINAASPNKELAKEFLENYLLTDEGLEAVNKDKPLGAVALKSYEEELVKDPRIAATMENAQKGEIMPNIPQMSAFWYAVRTAVINAASGRQTVDEALKDAQTNSGSGSGENLYFQDEARKAIARVKRESKRIVEDAERLIREAAAASEKXSREAERLXR

SEQ ID NO: 27029 - protein, 456 aa, Artificial Sequence
  Synthetic
  MISC_FEATURE (1)..(400): optional
  misc_feature (443)..(443): Xaa can be any naturally occurring amino acid
  misc_feature (453)..(453): Xaa can be any naturally occurring amino acid
MGSSHHHHHHSSGLVPRGSHMKIEEGKLVIWINGDKGYNGLAEVGKKFEKDTGIKVTVEHPDKLEEKFPQVAATGDGPDIIFWAHDRFGGYAQSGLLAEITPDKAFQDKLYPFTWDAVRYNGKLIAYPIAVEALSLIYNKDLLPNPPKTWEEIPALDKELKAKGKSALMFNLQEPYFTWPLIAADGGYAFKYENGKYDIKDVGVDNAGAKAGLTFLVDLIKNKHMNADTDYSIAEAAFNKGETAMTINGPWAWSNIDTSKVNYGVTVLPTFKGQPSKPFVGVLSAGINAASPNKELAKEFLENYLLTDEGLEAVNKDKPLGAVALKSYEEELVKDPRIAATMENAQKGEIMPNIPQMSAFWYAVRTAVINAASGRQTVDEALKDAQTNSGSGSGENLYFQDEARKAIARVKRESKRIVEDAERLIREAAQASEKISREARELXERAAQASEKXSRE

SEQ ID NO: 27030 - protein, 444 aa, Artificial Sequence
  Synthetic
  MISC_FEATURE (1)..(400): optional
  misc_feature (435)..(435): Xaa can be any naturally occurring amino acid
  misc_feature (443)..(443): Xaa can be any naturally occurring amino acid
MGSSHHHHHHSSGLVPRGSHMKIEEGKLVIWINGDKGYNGLAEVGKKFEKDTGIKVTVEHPDKLEEKFPQVAATGDGPDIIFWAHDRFGGYAQSGLLAEITPDKAFQDKLYPFTWDAVRYNGKLIAYPIAVEALSLIYNKDLLPNPPKTWEEIPALDKELKAKGKSALMFNLQEPYFTWPLIAADGGYAFKYENGKYDIKDVGVDNAGAKAGLTFLVDLIKNKHMNADTDYSIAEAAFNKGETAMTINGPWAWSNIDTSKVNYGVTVLPTFKGQPSKPFVGVLSAGINAASPNKELAKEFLENYLLTDEGLEAVNKDKPLGAVALKSYEEELVKDPRIAATMENAQKGEIMPNIPQMSAFWYAVRTAVINAASGRQTVDEALKDAQTNSGSGSGENLYFQDEARKAIARVKRESKRIVEDAERLIREAAQASEKXSREAERLXR

SEQ ID NO: 27031 - protein, 80 aa, Artificial Sequence
  Synthetic
  MISC_FEATURE (1)..(24): optional
MGSHHHHHHGSGSENLYFQGSGGSDEARKAIARVKRESKRIVEDAEGLISEAAAASEKISREAERLIREAAAASEKISRE

SEQ ID NO: 27032 - protein, 80 aa, Artificial Sequence
  Synthetic
  MISC_FEATURE (1)..(24): optional
MGSHHHHHHGSGSENLYFQGSGGSDEARKAIARVKRESKRIVEDAERLIREAAGSSEKISREAERLIREAAAASEKISRE

SEQ ID NO: 27033 - protein, 80 aa, Artificial Sequence
  Synthetic
  MISC_FEATURE (1)..(24): optional
MGSHHHHHHGSGSENLYFQGSGGSDEARKAIARVKRESKRIVEDAERLIGEAAAASEKISREAERLIREAAAASEKISRE

SEQ ID NO: 27034 - protein, 68 aa, Artificial Sequence
  Synthetic
  MISC_FEATURE (1)..(24): optional
MGSHHHHHHGSGSENLYFQGSGGSDEARKAIARVKRESKRIVGDAERLIREAAAASEKISREAERLIR

SEQ ID NO: 27035 - protein, 68 aa, Artificial Sequence
  Synthetic
  MISC_FEATURE (1)..(24): optional
MGSHHHHHHGSGSENLYFQGSGGSDEARKAIARVKRESKRIVEDAEGLISEAAAASEKISREAERLIR

SEQ ID NO: 27036 - protein, 68 aa, Artificial Sequence
  Synthetic
  MISC_FEATURE (1)..(24): optional
MGSHHHHHHGSGSENLYFQGSGGSDEARKAIARVAEESKRIVEDAERLIREAAAASEKISREAERLIR

SEQ ID NO: 27037 - protein, 68 aa, Artificial Sequence
  Synthetic
  MISC_FEATURE (1)..(24): optional
MGSHHHHHHGSGSENLYFQGSGGSDEAAKAIARVAEESKRIVEDAERLIREAAAASEKISREAERLIR

SEQ ID NO: 27038 - protein, 68 aa, Artificial Sequence
  Synthetic
  MISC_FEATURE (1)..(24): optional
MGSHHHHHHGSGSENLYFQGSGGSDEARKAIARVKRESKRIVEDAERLIREAAEASEEISREAERLIR

SEQ ID NO: 27039 - protein, 492 aa, Artificial Sequence
  Synthetic
  MISC_FEATURE (1)..(404): optional
  misc_feature (447)..(447): Xaa can be any naturally occurring amino acid
  misc_feature (457)..(457): Xaa can be any naturally occurring amino acid
  MISC_FEATURE (461)..(479): optional
MGSHHHHHHGSGSENLYFQGSGGSMKIEEGKLVIWINGDKGYNGLAEVGKKFEKDTGIKVTVEHPDKLEEKFPQVAATGDGPDIIFWAHDRFGGYAQSGLLAEITPDKAFQDKLYPFTWDAVRYNGKLIAYPIAVEALSLIYNKDLLPNPPKTWEEIPALDKELKAKGKSALMFNLQEPYFTWPLIAADGGYAFKYENGKYDIKDVGVDNAGAKAGLTFLVDLIKNKHMNADTDYSIAEAAFNKGETAMTINGPWAWSNIDTSKVNYGVTVLPTFKGQPSKPFVGVLSAGINAASPNKELAKEFLENYLLTDEGLEAVNKDKPLGAVALKSYEEELVKDPRIAATMENAQKGEIMPNIPQMSAFWYAVRTAVINAASGRQTVDEALKDAQTNSGSGSGENLYFQDEARKAIARVKRESKRIVEDAERLIREAAAASEKISREAERLXREAAAASEKXSREGGGSGSGSGSGKPGQASGSAHIVMVDAYKPTK

SEQ ID NO: 27040 - protein, 480 aa, Artificial Sequence
  Synthetic
  MISC_FEATURE (1)..(404): optional
  misc_feature (439)..(439): Xaa can be any naturally occurring amino acid
  misc_feature (447)..(447): Xaa can be any naturally occurring amino acid
  MISC_FEATURE (449)..(467): optional
MGSHHHHHHGSGSENLYFQGSGGSMKIEEGKLVIWINGDKGYNGLAEVGKKFEKDTGIKVTVEHPDKLEEKFPQVAATGDGPDIIFWAHDRFGGYAQSGLLAEITPDKAFQDKLYPFTWDAVRYNGKLIAYPIAVEALSLIYNKDLLPNPPKTWEEIPALDKELKAKGKSALMFNLQEPYFTWPLIAADGGYAFKYENGKYDIKDVGVDNAGAKAGLTFLVDLIKNKHMNADTDYSIAEAAFNKGETAMTINGPWAWSNIDTSKVNYGVTVLPTFKGQPSKPFVGVLSAGINAASPNKELAKEFLENYLLTDEGLEAVNKDKPLGAVALKSYEEELVKDPRIAATMENAQKGEIMPNIPQMSAFWYAVRTAVINAASGRQTVDEALKDAQTNSGSGSGENLYFQDEARKAIARVKRESKRIVEDAERLIREAAAASEKXSREAERLXRGGGSGSGSGSGKPGQASGSAHIVMVDAYKPTK

SEQ ID NO: 27041 - protein, 510 aa, Artificial Sequence
  Synthetic
  MISC_FEATURE (1)..(454): optional
MGSSHHHHHHSSGLVPRGSHMSKGEELFTGVVPILVELDGDVNGHKFSVRGEGEGDATNGKLTLKFICTTGKLPVPWPTLVTTLTYGVQCFARYPDHMKQHDFFKSAMPEGYVQERTISFKDDGTYKTRAEVKFEGDTLVNRIELKGIDFKEDGNILGHKLEYNFNSHNVYITADKQKNGIKANFKIRHNVEDGSVQLADHYQQNTPIGDGPVLLPDNHYLSTQSVLSKDPNEKRDHMVLLEFVTAAGITHGMDELYKSGSGSGCFAKGTNVLMADGSIECIENIEVGNKVMGKDGRPREVIKLPRGRETMYSVVQKSQHRAHKSDSSREVPELLKFTCNATHELVVRTPRSVRRLSRTIKGVEYFEVITFEMGQKKAPDGRIVELVKEVSKSYPISEGPERANELVESYRKASNKAYFEWTIEARDLSLLGSHVRKATYQTYAPILYGGSGGSDEARKAIARVKRESKRIVEDAERLIREAAAASEKISREAERLIREAAAASEKISRE

SEQ ID NO: 27042 - protein, 394 aa, Artificial Sequence
  Synthetic
  MISC_FEATURE (1)..(22): optional
  MISC_FEATURE (79)..(394): optional
MGSHHHHHHGSGSENLYFQGSGDEARKAIARVKRESKRIVEDAERLIREAAAASEKISREAERLIREAAAASEKISREGSGGSGSGGGVLLNVLSKCAGSKKFRPAPAAAFARECRGFYFELQELKEDDYYGITLSDDSDHQFLLANQVVVHNCGSGGSVSKGEEDNMAIIKEFMRFKVHMEGSVNGHEFEIEGEGEGRPYEGTQTAKLKVTKGGPLPFAWDILSPQFMYGSKAYVKHPADIPDYLKLSFPEGFKWERVMNFEDGGVVTVTQDSSLQDGEFIYKVKLRGTNFPSDGPVMQKKTMGWEASSERMYPEDGALKGEIKQRLKLKDGGHYDAEVKTTYKAKKPVQLPGAYNVNIKLDITSHNEDYTIVEQYERAEGRHSTGGMDELYK

SEQ ID NO: 27043 - protein, 58 aa, Artificial Sequence
  Synthetic
DKVRKVAEVAEKVLRDIDKLDRESKEAFRRTNGEISKLDEDTRRVAERVKKAIEDLAK

SEQ ID NO: 27044 - protein, 54 aa, Artificial Sequence
  Synthetic
SEVDEIIADNERALDEVRREVEEIDKENAERLKEWVEEAREILDRLAKALEEIR

SEQ ID NO: 27045 - protein, 60 aa, Artificial Sequence
  Synthetic
PEEALSKAIKDVRDIVKKVKDELKEWRDRNKELVDRLSEELKEWLKDVERVLKELTDKDR

SEQ ID NO: 27046 - protein, 56 aa, Artificial Sequence; identical to SEQ ID NO: 26790
  Synthetic

SEQ ID NO: 27047 - protein, 59 aa, Artificial Sequence
  Synthetic
SRLVKKLDEIVKEVAKKLEDVVRANEELWRKLVELNKESVARLREAVERVARDLEETAR

SEQ ID NO: 27048 - protein, 54 aa, Artificial Sequence
  Synthetic
SDEERLEKVVKDVIEKVRRILEKWKKDIDKVVKELRRILEEWEKIIREVLDKVR

SEQ ID NO: 27049 - protein, 57 aa, Artificial Sequence
  Synthetic
DKDAVIKVIEKLIRANAAVWDALLKINEDLVRVNKTVWKELLRVNEKLARDLERVVK

SEQ ID NO: 27050 - protein, 55 aa, Artificial Sequence
  Synthetic
SLVDELRKSLERNVRVSEEVARRLKEALKRWVDVVRKVVEDLIRLNEDVVRVVEK

SEQ ID NO: 27051 - protein, 59 aa, Artificial Sequence; identical to SEQ ID NO: 27047
  Synthetic

SEQ ID NO: 27052 - protein, 16 aa, Artificial Sequence
  Synthetic
RDHMVLHEYVNAAGIT

SEQ ID NO: 27053 - protein, 6 aa, Artificial Sequence
  Synthetic
RLVGFE

SEQ ID NO: 27054 - protein, 13 aa, Artificial Sequence
  Synthetic
  MISC_FEATURE (11)..(13): optional
AHIVMVDAYKPTK

SEQ ID NO: 27055 - protein, 9 aa, Artificial Sequence
  Synthetic
AAAKRARTS

SEQ ID NO: 27056 - protein, 11 aa, Artificial Sequence
  Synthetic
LALKLAGLDIN

SEQ ID NO: 27057 - protein, 12 aa, Artificial Sequence
  Synthetic
ELAEKLAGLDIN

SEQ ID NO: 27058 - protein, 13 aa, Artificial Sequence
  Synthetic
ELAEKLRAGLDLN

SEQ ID NO: 27059 - protein, 27 aa, Artificial Sequence
  Synthetic
TMFSSNRQKILERTETLNQEWKQRRIQ

SEQ ID NO: 27060 - protein, 10 aa, Artificial Sequence
  Synthetic
ETFSDLWKLL

SEQ ID NO: 27061 - protein, 33 aa, Artificial Sequence
  Synthetic
GELDELVYLLDGPGYDPIHSDVVTRGGSHLFNF

SEQ ID NO: 27062 - protein, 12 aa, Artificial Sequence
  Synthetic
TMDDVYNYLFDD

SEQ ID NO: 27063 - protein, 13 aa, Artificial Sequence
  Synthetic
LLTGLFVQYLFDD

SEQ ID NO: 27064 - protein, 11 aa, Artificial Sequence
  Synthetic
DDAVVESFFSS

SEQ ID NO: 27065 - protein, 9 aa, Artificial Sequence
  Synthetic
GDFLSDLFD

SEQ ID NO: 27066 - protein, 9 aa, Artificial Sequence
  Synthetic
GDVLSDLVD

SEQ ID NO: 27067 - protein, 13 aa, Artificial Sequence
  Synthetic
NIQMLLEAADYLE

SEQ ID NO: 27068 - protein, 13 aa, Artificial Sequence
  Synthetic
NIAMLLAAAAYLE

SEQ ID NO: 27069 - protein, 4 aa, Artificial Sequence
  Synthetic
IQIG

SEQ ID NO: 27070 - protein, 4 aa, Artificial Sequence
  Synthetic
VQLG

SEQ ID NO: 27071 - protein, 11 aa, Artificial Sequence
  Synthetic
VSGWRLFKKIS

SEQ ID NO: 27072 - protein, 27 aa, Artificial Sequence
  Synthetic
GLEQEIAALEKENAALEWEIAALEQGG

SEQ ID NO: 27073 - protein, 27 aa, Artificial Sequence
  Synthetic
GLKQKIAALKYKNAALKKKIAALKQGG

SEQ ID NO: 27074 - protein, 33 aa, Artificial Sequence
  Synthetic
RMKQLEDKVEELLSKNYHLENEVARLKKLVGER

SEQ ID NO: 27075 - protein, 30 aa, Artificial Sequence
  Synthetic
GEIAALKQEIAALKKENAALKWEIAALKQG

SEQ ID NO: 27076 - protein, 30 aa, Artificial Sequence
  Synthetic
WEAALAEALAEALAEHLAEALAEALEALAA

SEQ ID NO: 27077 - protein, 13 aa, Artificial Sequence
  Synthetic
GLFDIIKKIAESF

SEQ ID NO: 27078 - protein, 23 aa, Artificial Sequence
  Synthetic
GIGKFLHSAGKFGKAFVGEIMKS

SEQ ID NO: 27079 - protein, 23 aa, Artificial Sequence
  Synthetic
GIGKFLHSAKKFGKAFVGEIMNS

SEQ ID NO: 27080 - protein, 26 aa, Artificial Sequence
  Synthetic
GIGAVLKVLTTGLPALISWIKRKRQQ

SEQ ID NO: 27081 - protein, 14 aa, Artificial Sequence
  Synthetic
INWKGIAAMAKKLL

SEQ ID NO: 27082 - protein, 37 aa, Artificial Sequence
  Synthetic
KWKLFKKIEKVGQNIRDGIIKAGPAVAVVGQATQIAK

SEQ ID NO: 27083 - protein, 31 aa, Artificial Sequence
  Synthetic
SWLSKTAKKLENSAKKRISEGIAIAIQGGPR

SEQ ID NO: 27084 - protein, 16 aa, Artificial Sequence
  Synthetic
GLFDVIKKVASVIGGL

SEQ ID NO: 27085 - protein, 14 aa, Artificial Sequence
  Synthetic
NFLGTLINLAKKIL

SEQ ID NO: 27086 - protein, 23 aa, Artificial Sequence
  Synthetic
SYFILRRRRKRFPYFFTDVRVAA

SEQ ID NO: 27087 - protein, 21 aa, Artificial Sequence
  Synthetic
AFSWGSLWSGIKNFGSTVKNY

SEQ ID NO: 27088 - protein, 21 aa, Artificial Sequence
  Synthetic
ASMWERVKSIIKSSLAAASNI

SEQ ID NO: 27089 - protein, 50 aa, Artificial Sequence
  Synthetic
VTSTITEKLLKNLIKIISSLVIITRNYEDTTTVLATLALLGCDASPWQWL

SEQ ID NO: 27090 - protein, 24 aa, Artificial Sequence
  Synthetic
IAQNPVENYIDEVLNEVLVVPNIN

SEQ ID NO: 27091 - protein, 20 aa, Artificial Sequence
  Synthetic
FLGIAEAIDIGNGWEGMEFG

SEQ ID NO: 27092 - protein, 20 aa, Artificial Sequence
  Synthetic
GLFGAIAGFIENGWEGMIDG

SEQ ID NO: 27093 - protein, 23 aa, Artificial Sequence
  Synthetic
GLFGAIAGFIENGWEGMIDGWYG

SEQ ID NO: 27094 - protein, 285 aa, Artificial Sequence; identical to SEQ ID NO: 67
  Synthetic

SEQ ID NO: 27095 - protein, 236 aa, Artificial Sequence
  Synthetic
MSLVDELEIWIAQELRRIGDEFNAYYAALKRWVDVVRKVVEDLIRLNEDVVRVVEKVGVDESAIERVRRIIEELNRALDAVLKKNEDLVRRLTELLDKLLEENRRLVEELDEDLKRRGGTEEVIDTILELIERSIERLKRLLDELLRIVREALKDNARVADENLKALKEILDELRKDGVSDEELKRVLEKAADLHARLKDAHRKLLEDLERIIRELKKKLDEVVEENKRSVDELKR

SEQ ID NO: 27096 - protein, 237 aa, Artificial Sequence; identical to SEQ ID NO: 90
  Synthetic

SEQ ID NO: 27097 - protein, 175 aa, Artificial Sequence; identical to SEQ ID NO: 91
  Synthetic

SEQ ID NO: 27098 - protein, 289 aa, Artificial Sequence
  Synthetic
MSELARKLLEASTKLQRLNIRLAEALLEAIARLQELNLELVYLAVELTDPKRIRDEIKEVKDKSKEIIRRAEKEIDDAAKESEKILEEAREAISGSGSELAKLLLKAIAETQDLNLRAAKAFLEAAAKLQELNIRAVELLVKLTDPATIREALEHAKRRSKEIIDEAERAIRAAKRESERIIEEARRLIEKGSGSGSELARELLRAHAQLQRLNLELLRELLRALAQLQELNLDLLRLASELTDPDEARAHIVMVDAYKKRIVEDAERLIREAAAASEKISREAERLIR

SEQ ID NO: 27099 - protein, 289 aa, Artificial Sequence
  Synthetic
MSELARKLLEASTKLQRLNIRLAEALLEAIARLQELNLELVYLAVELTDPKRIRDEIKEVKDKSKEIIRRAEKEIDDAAKESEKILEEAREAISGSGSELAKLLLKAIAETQDLNLRAAKAFLEAAAKLQELNIRAVELLVKLTDPATIREALEHAKRRSKEIIDEAERAIRAAKRESERIIEEARRLIEKGSGSGSELARELLRAHAQLQRLNLELLRELLRALAQLQELNLDLLRLASELTDPDEARKAIARVKRESKAHIVMVDAYKREAAAASEKISREAERLIR

SEQ ID NO: 27100 - protein, 289 aa, Artificial Sequence
  Synthetic
MSELARKLLEASTKLQRLNIRLAEALLEAIARLQELNLELVYLAVELTDPKRIRDEIKEVKDKSKEIIRRAEKEIDDAAKESEKILEEAREAISGSGSELAKLLLKAIAETQDLNLRAAKAFLEAAAKLQELNIRAVELLVKLTDPATIREALEHAKRRSKEIIDEAERAIRAAKRESERIIEEARRLIEKGSGSGSELARELLRAHAQLQRLNLELLRELLRALAQLQELNLDLLRLASELTDPDEARENLYFQGSESKRIVEDAERLIREAAAASEKISREAERLIR

SEQ ID NO: 27101 - protein, 289 aa, Artificial Sequence
  Synthetic
MSELARKLLEASTKLQRLNIRLAEALLEAIARLQELNLELVYLAVELTDPKRIRDEIKEVKDKSKEIIRRAEKEIDDAAKESEKILEEAREAISGSGSELAKLLLKAIAETQDLNLRAAKAFLEAAAKLQELNIRAVELLVKLTDPATIREALEHAKRRSKEIIDEAERAIRAAKRESERIIEEARRLIEKGSGSGSELARELLRAHAQLQRLNLELLRELLRALAQLQELNLDLLRLASELTDPDEARKAIARVKRESKRIVENLYFQGSEAAAASEKISREAERLIR

SEQ ID NO: 27102 - protein, 289 aa, Artificial Sequence
  Synthetic
MSELARKLLEASTKLQRLNIRLAEALLEAIARLQELNLELVYLAVELTDPKRIRDEIKEVKDKSKEIIRRAEKEIDDAAKESEKILEEAREAISGSGSELAKLLLKAIAETQDLNLRAAKAFLEAAAKLQELNIRAVELLVKLTDPATIREALEHAKRRSKEIIDEAERAIRAAKRESERIIEEARRLIEKGSGSGSELARELLRAHAQLQRLNLELLRELLRALAQLQELNLDLLRLASELTDPDEARVSGWRLFKKISRIVEDAERLIREAAAASEKISREAERLIR

SEQ ID NO: 27103 - protein, 289 aa, Artificial Sequence
  Synthetic
MSELARKLLEASTKLQRLNIRLAEALLEAIARLQELNLELVYLAVELTDPKRIRDEIKEVKDKSKEIIRRAEKEIDDAAKESEKILEEAREAISGSGSELAKLLLKAIAETQDLNLRAAKAFLEAAAKLQELNIRAVELLVKLTDPATIREALEHAKRRSKEIIDEAERAIRAAKRESERIIEEARRLIEKGSGSGSELARELLRAHAQLQRLNLELLRELLRALAQLQELNLDLLRLASELTDPDEARKAIARVKRESKVSGWRLFKKISEAAAASEKISREAERLIR

SEQ ID NO: 27104 - protein, 289 aa, Artificial Sequence
  Synthetic
MSELARKLLEASTKLQRLNIRLAEALLEAIARLQELNLELVYLAVELTDPKRIRDEIKEVKDKSKEIIRRAEKEIDDAAKESEKILEEAREAISGSGSELAKLLLKAIAETQDLNLRAAKAFLEAAAKLQELNIRAVELLVKLTDPATIREALEHAKRRSKEIIDEAERAIRAAKRESERIIEEARRLIEKGSGSGSELARELLRAHAQLQRLNLELLRELLRALAQLQELNLDLLRLASELTDPDEARKAIIQIGRESKRIVEDAERLIREAAAASEKISVQLGRLIR

SEQ ID NO: 27105 - protein, 289 aa, Artificial Sequence
  Synthetic
MSELARKLLEASTKLQRLNIRLAEALLEAIARLQELNLELVYLAVELTDPKRIRDEIKEVKDKSKEIIRRAEKEIDDAAKESEKILEEAREAISGSGSELAKLLLKAIAETQDLNLRAAKAFLEAAAKLQELNIRAVELLVKLTDPATIREALEHAKRRSKEIIDEAERAIRAAKRESERIIEEARRLIEKGSGSGSELARELLRAHAQLQRLNLELLRELLRALAQLQELNLDLLRLASELTDPDEARKAIARVKRESKRIVIQIGRLIVQLGAASEKISREAERLIR

SEQ ID NO: 27106 - protein, 289 aa, Artificial Sequence
  Synthetic
MSELARKLLEASTKLQRLNIRLAEALLEAIARLQELNLELVYLAVELTDPKRIRDEIKEVKDKSKEIIRRAEKEIDDAAKESEKILEEAREAISGSGSELAKLLLKAIAETQDLNLRAAKAFLEAAAKLQELNIRAVELLVKLTDPATIREALEHAKRRSKEIIDEAERAIRAAKRESERIIEEARRLIEKGSGSGSELARELLRAHAQLQRLNLELLRELLRALAQLQELNLDLLRLASELTDPDEARKAIARVKRESKRIVIQIGRLIREAAAASEKISVQLGRLIR

SEQ ID NO: 27107 - protein, 289 aa, Artificial Sequence
  Synthetic
MSELARKLLEASTKLQRLNIRLAEALLEAIARLQELNLELVYLAVELTDPKRIRDEIKEVKDKSKEIIRRAEKEIDDAAKESEKILEEAREAISGSGSELAKLLLKAIAETQDLNLRAAKAFLEAAAKLQELNIRAVELLVKLTDPATIREALEHAKRRSKEIIDEAERAIRAAKRESERIIEEARRLIEKGSGSGSELARELLRAHAQLQRLNLELLRELLRALAQLQELNLDLLRLASELTDPDESVKELEDKVEELLSKNYHLENEVARLKKLVGERSREAERLIR

SEQ ID NO: 27108 - protein, 289 aa, Artificial Sequence
  Synthetic
MSELARKLLEASTKLQRLNIRLAEALLEAIARLQELNLELVYLAVELTDPKRIRDEIKEVKDKSKEIIRRAEKEIDDAAKESEKILEEAREAISGSGSELAKLLLKAIAETQDLNLRAAKAFLEAAAKLQELNIRAVELLVKLTDPATIREALEHAKRRSKEIIDEAERAIRAAKRESERIIEEARRLIEKGSGSGSELARELLRAHAQLQRLNLELLRELLRALAQLQELNLDLLRLASELTDPDEARKAIAGEIAALKQEIAALKKENAALKWEIAALKQGAERLIR

SEQ ID NO: 27109 - protein, 289 aa, Artificial Sequence
  Synthetic
MSELARKLLEASTKLQRLNIRLAEALLEAIARLQELNLELVYLAVELTDPKRIRDEIKEVKDKSKEIIRRAEKEIDDAAKESEKILEEAREAISGSGSELAKLLLKAIAETQDLNLRAAKAFLEAAAKLQELNIRAVELLVKLTDPATIREALEHAKRRSKEIIDEAERAIRAAKRESERIIEEARRLIEKGSGSGSELARELLRAHAQLQRLNLELLRELLRALAQLQELNLDLLRLASELTDPDEARKAIARVKRGLEQEIAALEKENAALEWEIAALEQGGERLIR

SEQ ID NO: 27110 - protein, 289 aa, Artificial Sequence
  Synthetic
MSELARKLLEASTKLQRLNIRLAEALLEAIARLQELNLELVYLAVELTDPKRIRDEIKEVKDKSKEIIRRAEKEIDDAAKESEKILEEAREAISGSGSELAKLLLKAIAETQDLNLRAAKAFLEAAAKLQELNIRAVELLVKLTDPATIREALEHAKRRSKEIIDEAERAIRAAKRESERIIEEARRLIEKGSGSGSELARELLRAHAQLQRLNLELLRELLRALAQLQELNLDLLRLASELTDPDEARKAIARVKRGLKQKIAALKYKNAALKKKIAALKQGGERLIR

SEQ ID NO: 27111 - protein, 288 aa, Artificial Sequence
  Synthetic
SELARKLLEASTKLQRLNIRLAEALLEAIARLQELNLELVYLAVELTDPKRIRDEIKEVKDKSKEIIRRAEKEIDDAAKESEKILEEAREAISGSGSELAKLLLKAIAETQDLNLRAAKAFLEAAAKLQELNIRAVELLVKLTDPATIREALEHAKRRSKEIIDEAERAIRAAKRESERIIEEARRLIEKGSGSGSELARELLRAHAQLQRLNLELLRELLRALAQLQELNLDLLRLASELTDPDEARKAIENLYFQGSRIVEDAEAHIVMVDAYKEKISREAERLIR

SEQ ID NO: 27112 - protein, 288 aa, Artificial Sequence
  Synthetic
SELARKLLEASTKLQRLNIRLAEALLEAIARLQELNLELVYLAVELTDPKRIRDEIKEVKDKSKEIIRRAEKEIDDAAKESEKILEEAREAISGSGSELAKLLLKAIAETQDLNLRAAKAFLEAAAKLQELNIRAVELLVKLTDPATIREALEHAKRRSKEIIDEAERAIRAAKRESERIIEEARRLIEKGSGSGSELARELLRAHAQLQRLNLELLRELLRALAQLQELNLDLLRLASELTDPDEARKAIARVENLYFQGSEDAERLIREAAHIVMVDAYKAERLIR

SEQ ID NO: 27113 - protein, 288 aa, Artificial Sequence
  Synthetic
SELARKLLEASTKLQRLNIRLAEALLEAIARLQELNLELVYLAVELTDPKRIRDEIKEVKDKSKEIIRRAEKEIDDAAKESEKILEEAREAISGSGSELAKLLLKAIAETQDLNLRAAKAFLEAAAKLQELNIRAVELLVKLTDPATIREALEHAKRRSKEIIDEAERAIRAAKRESERIIEEARRLIEKGSGSGSELARELLRAHAQLQRLNLELLRELLRALAQLQELNLDLLRLASELTDPDEARKAIARVKENLYFQGSDAERLIREAAHIVMVDAYKAERLIR

SEQ ID NO: 27114 - protein, 359 aa, Artificial Sequence
  Synthetic
SKEAAKKLQDLNIELARKLLEASTKLQRLNIRLAEALLEAIARLQELNLELVYLAVELTDPKRIRDEIKEVKDKSKEIIRRAEKEIDDAAKESKKILEEARKAIRDAAEESRKILEEGSGSGSDALDELQKLNLELAKLLLKAIAETQDLNLRAAKAFLEAAAKLQELNIRAVELLVKLTDPATIRRALEHAKRRSKEIIDEAERAIRAAKRESERIIEEARRLIEKAKEESERIIREGSGSGDPDIKKLQDLNIELARELLRAHAQLQRLNLELLRELLRALAQLQELNLDLLRLASELTDPDEARKAIARVKENLYFQGSDAERLIREAAAASEAHIVMVDAYKREAAAASEKISRE

SEQ ID NO: 27115 - protein, 359 aa, Artificial Sequence
  Synthetic
SKEAAKKLQDLNIELARKLLEASTKLQRLNIRLAEALLEAIARLQELNLELVYLAVELTDPKRIRDEIKEVKDKSKEIIRRAEKEIDDAAKESKKILEEARKAIRDAAEESRKILEEGSGSGSDALDELQKLNLELAKLLLKAIAETQDLNLRAAKAFLEAAAKLQELNIRAVELLVKLTDPATIRRALEHAKRRSKEIIDEAERAIRAAKRESERIIEEARRLIEKAKEESERIIREGSGSGDPDIKKLQDLNIELARELLRAHAQLQRLNLELLRELLRALAQLQELNLDLLRLASELTDPDEARKAIARVKENLYFQGSDAERLIREAAAASEKISREAEAHIVMVDAYKEKISRE

SEQ ID NO: 27116 - protein, 760 aa, Artificial Sequence
  Synthetic
VSKGEELFTGVVPILVELDGDVNGHKFSVSGEGEGDATYGKLTLKFICTTGKLPVPWPTLVTTLSWGVQCFARYPDHMKQHDFFKSAMPEGYVQERTIFFKDDGNYKTRAEVKFEGDTLVNRIELKGIDFKEDGNILGHKLEYNYFSDNVYITADKQKNGIKANFKIRHNIEDGGVQLADHYQQNTPIGDGPVLLPDNHYLSTQSKLSKDPNEKRDHMVLLEFVTAAGITLELARKLLEASTKLQRLNIRLAEALLEAIARLQELNLELVYLAVELTDPKRIRDEIKEVKDKSKEIIRRAEKEIDDAAKESEKILEEAREAISGSGSELAKLLLKAIAETQDLNLRAAKAFLEAAAKLQELNIRAVELLVKLTDPATIREALEHAKRRSKEIIDEAERAIRAAKRESERIIEEARRLIEKGSGSGSELARELLRAHAQLQRLNLELLRELLRALAQLQELNLDLLRLASELTDEIWIAQELRRIGDEFNAYYADAERLIREAAAASEKISREAERLIRVSKGEELFTGVVPILVELDGDVNGHKFSVSGEGEGDATYGKLTLKLICTTGKLPVPWPTLVTTLGYGVQCFARYPDHMKQHDFFKSAMPEGYVQERTIFFKDDGNYKTRAEVKFEGDTLVNRIELKGIDFKEDGNILGHKLEYNYNSHNVYITADKQKNGIKANFKIRHNIEDGGVQLADHYQQNTPIGDGPVLLPDNHYLSYQSKLSKDPNEKRDHMVLLEFVTAAGITLGMDELYKGSGC

SEQ ID NO: 27117 - protein, 750 aa, Artificial Sequence
  Synthetic
VSKGEELFTGVVPILVELDGDVNGHKFSVSGEGEGDATYGKLTLKFICTTGKLPVPWPTLVTTLSWGVQCFARYPDHMKQHDFFKSAMPEGYVQERTIFFKDDGNYKTRAEVKFEGDTLVNRIELKGIDFKEDGNILGHKLEYNYFSDNVYITADKQKNGIKANFKIRHNIEDGGVQLADHYQQNTPIGDGPVLLPDNHYLSTQSKLSKDPNEKRDHMVLLEFVTAAGITLELARKLLEASTKLQRLNIRLAEALLEAIARLQELNLELVYLAVELTDPKRIRDEIKEVKDKSKEIIRRAEKEIDDAAKESEKILEEAREAISGSGSELAKLLLKAIAETQDLNLRAAKAFLEAAAKLQELNIRAVELLVKLTDPATIREALEHAKRRSKEIIDEAERAIRAAKRESERIIEEARRLIEKGSGSGSELARELLRAHAQLQRLNLELLRELLRALAQLQELNLDLLRLASELTDPDEARKAIARVKRESNAYYADAERLIREAAAASEKVSKGEELFTGVVPILVELDGDVNGHKFSVSGEGEGDATYGKLTLKLICTTGKLPVPWPTLVTTLGYGVQCFARYPDHMKQHDFFKSAMPEGYVQERTIFFKDDGNYKTRAEVKFEGDTLVNRIELKGIDFKEDGNILGHKLEYNYNSHNVYITADKQKNGIKANFKIRHNIEDGGVQLADHYQQNTPIGDGPVLLPDNHYLSYQSKLSKDPNEKRDHMVLLEFVTAAGITLGMDELYKGSGC

SEQ ID NO: 27118 - protein, 75 aa, Artificial Sequence
  Synthetic
MDAKSLTAWSRTLVTFKDVFVDFTREEWKLLDTAQQIVYRNVMLENYKNLVSLGYQLTKPDVILRLEKGEEPWLV

SEQ ID NO: 27119 - protein, 45 aa, Artificial Sequence
  Synthetic
RTLVTFKDVFVDFTREEWKLLDTAQQIVYRNVMLENYKNLVSLGY

SEQ ID NO: 27120 - protein, 407 aa, Artificial Sequence
  Synthetic
MSKEAVTKLQALNIKLAEKLLEAVTKLQALNIKLAEKLLEALARLQELNIALVYLAVELTDPKRIADEIKKVKDKSKEIVERAEEEIARAAAESKKILDEAEEEIARAAAESKKILDEGSGSGSDAVAELQALNLKLAELLLEAVAELQALNLKLAELLLEAIAKLQELNIKLVELLTKLTDPATIREAIRKVKEDSERIVAEAERLIAAAKAESERIIREAERLIAAAKAESERIIREGSGSGDPDVARLQELNIELARELLRDVARLQELNIELARELLRAAAELQELNIKLVELASELTGSRTLVTFKDVFVDFTREEWKLLDTAQQIVYRNVMLENYKNLVSLGYGSDEARKAIARVKRESKRIVEDAERLIREAAAASEKISREAERLIREAAAASEKISRE

SEQ ID NO: 27121 - protein, 394 aa, Artificial Sequence
  Synthetic
MSKEAVTKLQALNIKLAEKLLEAVTKLQALNIKLAEKLLEALARLQELNIALVYLAVELTDPKRIADEIKKVKDKSKEIVERAEEEIARAAAESKKILDEAEEEIARAAAESKKILDEGSGSGSDAVAELQALNLKLAELLLEAVAELQALNLKLAELLLEAIAKLQELNIKLVELLTKLTDPATIREAIRKVKEDSERIVAEAERLIAAAKAESERIIREAERLIAAAKAESERIIREGSGSGDPDVARLQELNIELARELLRDVARLQELNIELARELLRAAAELQELNIKLVELASELTGSRTLVTFKDVFVDFTREEWKLLDTAQQIVYRNVMLENYKNLVSLGYGSSKRIVEDAERLIREAAAASEKISREAERLIREAAAASEKISRE

SEQ ID NO: 27122 - protein, 398 aa, Artificial Sequence
  Synthetic
MSKEAVTKLQALNIKLAEKLLEAVTKLQALNIKLAEKLLEALARLQELNIALVYLAVELTDPKRIADEIKKVKDKSKEIVERAEEEIARAAAESKKILDEAEEEIARAAAESKKILDEGSGSGSDAVAELQALNLKLAELLLEAVAELQALNLKLAELLLEAIAKLQELNIKLVELLTKLTDPATIREAIRKVKEDSERIVAEAERLIAAAKAESERIIREAERLIAAAKAESERIIREGSGSGDPDVARLQELNIELARELLRDVARLQELNIELARELLRAAAELQELNIKLVELASELTGSRTLVTFKDVFVDFTREEWKLLDTAQQIVYRNVMLENYKNLVSLGYGSDEARKAIARVKRESKRIVEDAERLIREAAAASEKISREAERLIREAA

SEQ ID NO: 27123 - protein, 369 aa, Artificial Sequence
  Synthetic
MSKEAVTKLQALNIKLAEKLLEAVTKLQALNIKLAEKLLEALARLQELNIALVYLAVELTDPKRIADEIKKVKDKSKEIVERAEEEIARAAAESKKILDEAEEEIARAAAESKKILDEGSGSGSDAVAELQALNLKLAELLLEAVAELQALNLKLAELLLEAIAKLQELNIKLVELLTKLTDPATIREAIRKVKEDSERIVAEAERLIAAAKAESERIIREAERLIAAAKAESERIIREGSGSGDPDVARLQELNIELARELLRDVARLQELNIELARELLRAAAELQELNIKLVELASELTDEARKAIARVKRESKRIVEDAERTLVTFKDVFVDFTREEWKLLDTAQQIVYRNVMLENYKNLVSLGY

SEQ ID NO: 27124 - protein, 372 aa, Artificial Sequence
  Synthetic
MSKEAVTKLQALNIKLAEKLLEAVTKLQALNIKLAEKLLEALARLQELNIALVYLAVELTDPKRIADEIKKVKDKSKEIVERAEEEIARAAAESKKILDEAEEEIARAAAESKKILDEGSGSGSDAVAELQALNLKLAELLLEAVAELQALNLKLAELLLEAIAKLQELNIKLVELLTKLTDPATIREAIRKVKEDSERIVAEAERLIAAAKAESERIIREAERLIAAAKAESERIIREGSGSGDPDVARLQELNIELARELLRDVARLQELNIELARELLRAAAELQELNIKLVELASELTDEARKAIARVKRESKRIVEDAERLIRTLVTFKDVFVDFTREEWKLLDTAQQIVYRNVMLENYKNLVSLGY

SEQ ID NO: 27125 - protein, 383 aa, Artificial Sequence
  Synthetic
MSKEAVTKLQALNIKLAEKLLEAVTKLQALNIKLAEKLLEALARLQELNIALVYLAVELTDPKRIADEIKKVKDKSKEIVERAEEEIARAAAESKKILDEAEEEIARAAAESKKILDEGSGSGSDAVAELQALNLKLAELLLEAVAELQALNLKLAELLLEAIAKLQELNIKLVELLTKLTDPATIREAIRKVKEDSERIVAEAERLIAAAKAESERIIREAERLIAAAKAESERIIREGSGSGDPDVARLQELNIELARELLRDVARLQELNIELARELLRAAAELQELNIKLVELASELTDEARKAIARVKRESKRIVEDAERLIREAAAASEKISRTLVTFKDVFVDFTREEWKLLDTAQQIVYRNVMLENYKNLVSLGY

SEQ ID NO: 27126 - protein, 184 aa, Artificial Sequence; identical to SEQ ID NO: 6844
  Synthetic

SEQ ID NO: 27127 - protein, 59 aa, Artificial Sequence; identical to SEQ ID NO: 19128
  Synthetic

SEQ ID NO: 27128 - protein, 180 aa, Artificial Sequence; identical to SEQ ID NO: 12828
  Synthetic

SEQ ID NO: 27129 - protein, 59 aa, Artificial Sequence; identical to SEQ ID NO: 14436
  Synthetic

SEQ ID NO: 27130 - protein, 174 aa, Artificial Sequence; identical to SEQ ID NO: 12840
  Synthetic

SEQ ID NO: 27131 - protein, 56 aa, Artificial Sequence; identical to SEQ ID NO: 15502
  Synthetic

SEQ ID NO: 27132 - protein, 178 aa, Artificial Sequence; identical to SEQ ID NO: 12844
  Synthetic

SEQ ID NO: 27133 - protein, 55 aa, Artificial Sequence; identical to SEQ ID NO: 25128
  Synthetic

SEQ ID NO: 27134 - protein, 185 aa, Artificial Sequence; identical to SEQ ID NO: 12850
  Synthetic

SEQ ID NO: 27135 - protein, 59 aa, Artificial Sequence; identical to SEQ ID NO: 25134
  Synthetic

SEQ ID NO: 27136 - protein, 172 aa, Artificial Sequence; identical to SEQ ID NO: 12852
  Synthetic

SEQ ID NO: 27137 - protein, 56 aa, Artificial Sequence; identical to SEQ ID NO: 16914
  Synthetic

SEQ ID NO: 27138 - protein, 180 aa, Artificial Sequence; identical to SEQ ID NO: 12858
  Synthetic

SEQ ID NO: 27139 - protein, 56 aa, Artificial Sequence; identical to SEQ ID NO: 18130
  Synthetic

SEQ ID NO: 27140 - protein, 188 aa, Artificial Sequence; identical to SEQ ID NO: 554
  Synthetic

SEQ ID NO: 27141 - protein, 62 aa, Artificial Sequence; identical to SEQ ID NO: 25144
  Synthetic

SEQ ID NO: 27142 - protein, 188 aa, Artificial Sequence; identical to SEQ ID NO: 563
  Synthetic

SEQ ID NO: 27143 - protein, 62 aa, Artificial Sequence; identical to SEQ ID NO: 25144
  Synthetic

SEQ ID NO: 27144 - protein, 188 aa, Artificial Sequence; identical to SEQ ID NO: 595
  Synthetic

SEQ ID NO: 27145 - protein, 62 aa, Artificial Sequence; identical to SEQ ID NO: 25144
  Synthetic

SEQ ID NO: 27146 - protein, 176 aa, Artificial Sequence; identical to SEQ ID NO: 12874
  Synthetic

SEQ ID NO: 27147 - protein, 59 aa, Artificial Sequence; identical to SEQ ID NO: 25158
  Synthetic

SEQ ID NO: 27148 - protein, 184 aa, Artificial Sequence; identical to SEQ ID NO: 12894
  Synthetic

SEQ ID NO: 27149 - protein, 59 aa, Artificial Sequence; identical to SEQ ID NO: 25178
  Synthetic

SEQ ID NO: 27150 - protein, 176 aa, Artificial Sequence; identical to SEQ ID NO: 12902
  Synthetic

SEQ ID NO: 27151 - protein, 59 aa, Artificial Sequence; identical to SEQ ID NO: 25186
  Synthetic

SEQ ID NO: 27152 - protein, 182 aa, Artificial Sequence; identical to SEQ ID NO: 12906
  Synthetic

SEQ ID NO: 27153 - protein, 56 aa, Artificial Sequence; identical to SEQ ID NO: 25190
  Synthetic

SEQ ID NO: 27154 - protein, 186 aa, Artificial Sequence; identical to SEQ ID NO: 12908
  Synthetic

SEQ ID NO: 27155 - protein, 59 aa, Artificial Sequence; identical to SEQ ID NO: 25192
  Synthetic

SEQ ID NO: 27156 - protein, 175 aa, Artificial Sequence; identical to SEQ ID NO: 12924
  Synthetic

SEQ ID NO: 27157 - protein, 55 aa, Artificial Sequence; identical to SEQ ID NO: 25208
  Synthetic

SEQ ID NO: 27158 - protein, 180 aa, Artificial Sequence; identical to SEQ ID NO: 12962
  Synthetic

SEQ ID NO: 27159 - protein, 59 aa, Artificial Sequence; identical to SEQ ID NO: 25246
  Synthetic

SEQ ID NO: 27160 - protein, 177 aa, Artificial Sequence; identical to SEQ ID NO: 12970
  Synthetic

SEQ ID NO: 27161 - protein, 59 aa, Artificial Sequence; identical to SEQ ID NO: 24672
  Synthetic

SEQ ID NO: 27162 - protein, 184 aa, Artificial Sequence; identical to SEQ ID NO: 6844
  Synthetic

SEQ ID NO: 27163 - protein, 59 aa, Artificial Sequence; identical to SEQ ID NO: 19127
  Synthetic

SEQ ID NO: 27164 - protein, 178 aa, Artificial Sequence; identical to SEQ ID NO: 12844
  Synthetic

SEQ ID NO: 27165 - protein, 60 aa, Artificial Sequence; identical to SEQ ID NO: 25127
  Synthetic

SEQ ID NO: 27166 - protein, 185 aa, Artificial Sequence; identical to SEQ ID NO: 12850
  Synthetic

SEQ ID NO: 27167 - protein, 60 aa, Artificial Sequence; identical to SEQ ID NO: 25133
  Synthetic

SEQ ID NO: 27168 - protein, 172 aa, Artificial Sequence; identical to SEQ ID NO: 12852
  Synthetic

SEQ ID NO: 27169 - protein, 57 aa, Artificial Sequence; identical to SEQ ID NO: 25135
  Synthetic

SEQ ID NO: 27170 - protein, 180 aa, Artificial Sequence; identical to SEQ ID NO: 12858
  Synthetic

SEQ ID NO: 27171 - protein, 60 aa, Artificial Sequence; identical to SEQ ID NO: 25141
  Synthetic

SEQ ID NO: 27172 - protein, 188 aa, Artificial Sequence; identical to SEQ ID NO: 1740
  Synthetic

SEQ ID NO: 27173 - protein, 60 aa, Artificial Sequence; identical to SEQ ID NO: 19323
  Synthetic

SEQ ID NO: 27174 - protein, 188 aa, Artificial Sequence; identical to SEQ ID NO: 1911
  Synthetic

SEQ ID NO: 27175 - protein, 60 aa, Artificial Sequence; identical to SEQ ID NO: 19323
  Synthetic

SEQ ID NO: 27176 - protein, 186 aa, Artificial Sequence; identical to SEQ ID NO: 12908
  Synthetic

SEQ ID NO: 27177 - protein, 61 aa, Artificial Sequence; identical to SEQ ID NO: 25191
  Synthetic

SEQ ID NO: 27178 - protein, 247 aa, Artificial Sequence; identical to SEQ ID NO: 1129
  Synthetic

SEQ ID NO: 27179 - protein, 59 aa, Artificial Sequence; identical to SEQ ID NO: 25434
  Synthetic

SEQ ID NO: 27180 - protein, 235 aa, Artificial Sequence; identical to SEQ ID NO: 13508
  Synthetic

SEQ ID NO: 27181 - protein, 56 aa, Artificial Sequence; identical to SEQ ID NO: 25792
  Synthetic

SEQ ID NO: 27182 - protein, 238 aa, Artificial Sequence; identical to SEQ ID NO: 13970
  Synthetic

SEQ ID NO: 27183 - protein, 56 aa, Artificial Sequence; identical to SEQ ID NO: 25342
  Synthetic

SEQ ID NO: 27184 - protein, 239 aa, Artificial Sequence; identical to SEQ ID NO: 13982
  Synthetic

SEQ ID NO: 27185 - protein, 59 aa, Artificial Sequence; identical to SEQ ID NO: 26266
  Synthetic

SEQ ID NO: 27186 - protein, 244 aa, Artificial Sequence; identical to SEQ ID NO: 793
  Synthetic

SEQ ID NO: 27187 - protein, 60 aa, Artificial Sequence; identical to SEQ ID NO: 26278
  Synthetic

SEQ ID NO: 27188 - protein, 250 aa, Artificial Sequence; identical to SEQ ID NO: 1038
  Synthetic

SEQ ID NO: 27189 - protein, 59 aa, Artificial Sequence; identical to SEQ ID NO: 25380
  Synthetic

SEQ ID NO: 27190 - protein, 247 aa, Artificial Sequence; identical to SEQ ID NO: 14002
  Synthetic

SEQ ID NO: 27191 - protein, 59 aa, Artificial Sequence; identical to SEQ ID NO: 26286
  Synthetic

SEQ ID NO: 27192 - protein, 247 aa, Artificial Sequence; identical to SEQ ID NO: 896
  Synthetic

SEQ ID NO: 27193 - protein, 59 aa, Artificial Sequence; identical to SEQ ID NO: 25434
  Synthetic

SEQ ID NO: 27194 - protein, 247 aa, Artificial Sequence; identical to SEQ ID NO: 1006
  Synthetic

SEQ ID NO: 27195 - protein, 59 aa, Artificial Sequence; identical to SEQ ID NO: 25434
  Synthetic

SEQ ID NO: 27196 - protein, 247 aa, Artificial Sequence; identical to SEQ ID NO: 1114
  Synthetic

SEQ ID NO: 27197 - protein, 59 aa, Artificial Sequence; identical to SEQ ID NO: 25434
  Synthetic

SEQ ID NO: 27198 - protein, 247 aa, Artificial Sequence; identical to SEQ ID NO: 940
  Synthetic

SEQ ID NO: 27199 - protein, 59 aa, Artificial Sequence; identical to SEQ ID NO: 25434
  Synthetic

SEQ ID NO: 27200 - protein, 247 aa, Artificial Sequence; identical to SEQ ID NO: 974
  Synthetic

SEQ ID NO: 27201 - protein, 59 aa, Artificial Sequence; identical to SEQ ID NO: 25434
  Synthetic

SEQ ID NO: 27202 - protein, 247 aa, Artificial Sequence; identical to SEQ ID NO: 1042
  Synthetic

SEQ ID NO: 27203 - protein, 59 aa, Artificial Sequence; identical to SEQ ID NO: 25434
  Synthetic

SEQ ID NO: 27204 - protein, 240 aa, Artificial Sequence; identical to SEQ ID NO: 14042
  Synthetic

SEQ ID NO: 27205 - protein, 60 aa, Artificial Sequence; identical to SEQ ID NO: 25440
  Synthetic

SEQ ID NO: 27206 - protein, 248 aa, Artificial Sequence; identical to SEQ ID NO: 1045
  Synthetic

SEQ ID NO: 27207 - protein, 59 aa, Artificial Sequence; identical to SEQ ID NO: 26334
  Synthetic

SEQ ID NO: 27208 - protein, 248 aa, Artificial Sequence; identical to SEQ ID NO: 1097
  Synthetic

SEQ ID NO: 27209 - protein, 59 aa, Artificial Sequence; identical to SEQ ID NO: 26334
  Synthetic

SEQ ID NO: 27210 - protein, 248 aa, Artificial Sequence; identical to SEQ ID NO: 1160
  Synthetic

SEQ ID NO: 27211 - protein, 59 aa, Artificial Sequence; identical to SEQ ID NO: 26334
  Synthetic

SEQ ID NO: 27212 - protein, 242 aa, Artificial Sequence; identical to SEQ ID NO: 14058
  Synthetic

SEQ ID NO: 27213 - protein, 56 aa, Artificial Sequence; identical to SEQ ID NO: 26342
  Synthetic

SEQ ID NO: 27214 - protein, 231 aa, Artificial Sequence; identical to SEQ ID NO: 14078
  Synthetic

SEQ ID NO: 27215 - protein, 55 aa, Artificial Sequence; identical to SEQ ID NO: 25524
  Synthetic

SEQ ID NO: 27216 - protein, 239 aa, Artificial Sequence; identical to SEQ ID NO: 14094
  Synthetic

SEQ ID NO: 27217 - protein, 59 aa, Artificial Sequence; identical to SEQ ID NO: 26378
  Synthetic

SEQ ID NO: 27218 - protein, 241 aa, Artificial Sequence; identical to SEQ ID NO: 14102
  Synthetic

SEQ ID NO: 27219 - protein, 56 aa, Artificial Sequence; identical to SEQ ID NO: 26386
  Synthetic

SEQ ID NO: 27220 - protein, 246 aa, Artificial Sequence; identical to SEQ ID NO: 980
  Synthetic

SEQ ID NO: 27221 - protein, 55 aa, Artificial Sequence; identical to SEQ ID NO: 26402
  Synthetic

SEQ ID NO: 27222 - protein, 246 aa, Artificial Sequence; identical to SEQ ID NO: 1075
  Synthetic

SEQ ID NO: 27223 - protein, 55 aa, Artificial Sequence; identical to SEQ ID NO: 26402
  Synthetic

SEQ ID NO: 27224 - protein, 245 aa, Artificial Sequence; identical to SEQ ID NO: 14126
  Synthetic

SEQ ID NO: 27225 - protein, 59 aa, Artificial Sequence; identical to SEQ ID NO: 26410
  Synthetic

SEQ ID NO: 27226 - protein, 235 aa, Artificial Sequence; identical to SEQ ID NO: 14142
  Synthetic

SEQ ID NO: 27227 - protein, 56 aa, Artificial Sequence; identical to SEQ ID NO: 26426
  Synthetic

SEQ ID NO: 27228 - protein, 233 aa, Artificial Sequence; identical to SEQ ID NO: 14150
  Synthetic

SEQ ID NO: 27229 - protein, 59 aa, Artificial Sequence; identical to SEQ ID NO: 26434
  Synthetic

SEQ ID NO: 27230 - protein, 238 aa, Artificial Sequence; identical to SEQ ID NO: 14154
  Synthetic

SEQ ID NO: 27231 - protein, 56 aa, Artificial Sequence; identical to SEQ ID NO: 25780
  Synthetic

SEQ ID NO: 27232 - protein, 237 aa, Artificial Sequence; identical to SEQ ID NO: 14190
  Synthetic

SEQ ID NO: 27233 - protein, 59 aa, Artificial Sequence; identical to SEQ ID NO: 25896
  Synthetic

SEQ ID NO: 27234 - protein, 246 aa, Artificial Sequence; identical to SEQ ID NO: 14194
  Synthetic

SEQ ID NO: 27235 - protein, 60 aa, Artificial Sequence; identical to SEQ ID NO: 25898
  Synthetic

SEQ ID NO: 27236 - protein, 252 aa, Artificial Sequence; identical to SEQ ID NO: 14202
  Synthetic

SEQ ID NO: 27237 - protein, 60 aa, Artificial Sequence; identical to SEQ ID NO: 25950
  Synthetic

SEQ ID NO: 27238 - protein, 252 aa, Artificial Sequence; identical to SEQ ID NO: 1121
  Synthetic

SEQ ID NO: 27239 - protein, 60 aa, Artificial Sequence; identical to SEQ ID NO: 25950
  Synthetic

SEQ ID NO: 27240 - protein, 232 aa, Artificial Sequence; identical to SEQ ID NO: 14246
  Synthetic

SEQ ID NO: 27241 - protein, 56 aa, Artificial Sequence; identical to SEQ ID NO: 26068
  Synthetic

SEQ ID NO: 27242 - protein, 240 aa, Artificial Sequence; identical to SEQ ID NO: 14262
  Synthetic

SEQ ID NO: 27243 - protein, 56 aa, Artificial Sequence; identical to SEQ ID NO: 26546
  Synthetic

SEQ ID NO: 27244 - protein, 249 aa, Artificial Sequence; identical to SEQ ID NO: 992
  Synthetic

SEQ ID NO: 27245 - protein, 59 aa, Artificial Sequence; identical to SEQ ID NO: 26558
  Synthetic

SEQ ID NO: 27246 - protein, 249 aa, Artificial Sequence; identical to SEQ ID NO: 1107
  Synthetic

SEQ ID NO: 27247 - protein, 59 aa, Artificial Sequence; identical to SEQ ID NO: 26558
  Synthetic

SEQ ID NO: 27248 - protein, 249 aa, Artificial Sequence; identical to SEQ ID NO: 1122
  Synthetic

SEQ ID NO: 27249 - protein, 59 aa, Artificial Sequence; identical to SEQ ID NO: 26558
  Synthetic

SEQ ID NO: 27250 - protein, 249 aa, Artificial Sequence; identical to SEQ ID NO: 1026
  Synthetic

SEQ ID NO: 27251 - protein, 59 aa, Artificial Sequence; identical to SEQ ID NO: 26558
  Synthetic

SEQ ID NO: 27252 - protein, 249 aa, Artificial Sequence; identical to SEQ ID NO: 1168
  Synthetic

SEQ ID NO: 27253 - protein, 59 aa, Artificial Sequence; identical to SEQ ID NO: 26558
  Synthetic

SEQ ID NO: 27254 - protein, 249 aa, Artificial Sequence; identical to SEQ ID NO: 14274
  Synthetic

SEQ ID NO: 27255 - protein, 59 aa, Artificial Sequence; identical to SEQ ID NO: 26558
  Synthetic

SEQ ID NO: 27256 - protein, 243 aa, Artificial Sequence; identical to SEQ ID NO: 14286
  Synthetic

SEQ ID NO: 27257 - protein, 60 aa, Artificial Sequence; identical to SEQ ID NO: 26570
  Synthetic

SEQ ID NO: 27258 - protein, 243 aa, Artificial Sequence; identical to SEQ ID NO: 14298
  Synthetic

SEQ ID NO: 27259 - protein, 56 aa, Artificial Sequence; identical to SEQ ID NO: 26582
  Synthetic

SEQ ID NO: 27260 - protein, 232 aa, Artificial Sequence; identical to SEQ ID NO: 14302
  Synthetic

SEQ ID NO: 27261 - protein, 56 aa, Artificial Sequence; identical to SEQ ID NO: 26586
  Synthetic

SEQ ID NO: 27262 - protein, 235 aa, Artificial Sequence; identical to SEQ ID NO: 13508
  Synthetic

SEQ ID NO: 27263 - protein, 56 aa, Artificial Sequence; identical to SEQ ID NO: 25791
  Synthetic

SEQ ID NO: 27264 - protein, 239 aa, Artificial Sequence; identical to SEQ ID NO: 13982
  Synthetic

SEQ ID NO: 27265 - protein, 56 aa, Artificial Sequence; identical to SEQ ID NO: 26265
  Synthetic

SEQ ID NO: 27266 - protein, 247 aa, Artificial Sequence; identical to SEQ ID NO: 14002
  Synthetic

SEQ ID NO: 27267 - protein, 60 aa, Artificial Sequence; identical to SEQ ID NO: 26285
  Synthetic

SEQ ID NO: 27268 - protein, 247 aa, Artificial Sequence; identical to SEQ ID NO: 1366
  Synthetic

SEQ ID NO: 27269 - protein, 56 aa, Artificial Sequence; identical to SEQ ID NO: 26321
  Synthetic

SEQ ID NO: 27270 - protein, 246 aa, Artificial Sequence; identical to SEQ ID NO: 1930
  Synthetic

SEQ ID NO: 27271 - protein, 60 aa, Artificial Sequence; identical to SEQ ID NO: 26401
  Synthetic

SEQ ID NO: 27272 - protein, 235 aa, Artificial Sequence; identical to SEQ ID NO: 14142
  Synthetic

SEQ ID NO: 27273 - protein, 56 aa, Artificial Sequence; identical to SEQ ID NO: 26425
  Synthetic

SEQ ID NO: 27274 - protein, 252 aa, Artificial Sequence; identical to SEQ ID NO: 1481
  Synthetic

SEQ ID NO: 27275 - protein, 59 aa, Artificial Sequence; identical to SEQ ID NO: 26485
  Synthetic

SEQ ID NO: 27276 - protein, 249 aa, Artificial Sequence; identical to SEQ ID NO: 1624
  Synthetic

SEQ ID NO: 27277 - protein, 59 aa, Artificial Sequence; identical to SEQ ID NO: 26557
  Synthetic

SEQ ID NO: 27278 - protein, 235 aa, Artificial Sequence
  Synthetic
DEAKELLDEIRKAVKESEDRLEKLLRDYEKELRRDHMVLHEYVNAAGITLEELRRGSLDAKELLKTLEDLLREVLEVARRVVETLKELNRRVLEVVREDIEANERLLRRVLDTLRRGGVDERRIKDLERLIRESLKKAEEVLREAAEKSREIVDEIREVLKRADEALKRIIKKIRETRGADALSRLLEELLRVVDDLIRVLKELIDKSRKVIEELLELLKRINEENLKVLAEIIK

SEQ ID NO: 27279 - protein, 235 aa, Artificial Sequence
  Synthetic
DEAKELLDEIRKAVKESEDRLEKLLRDYEKELRRLEKELRDLKRRIEEKLEELRRGSLDAKELLKTLEDLLREVLEVARRVVETLKELNRRVLEVVREDIERNERLLRRVLDTLRRGGVDERRIKDLERLIRESLKKAEEVLREAAEKSREIVDEIREVLKRADEALKRIIKKIRETRGADADHMVLHEYVNAAGITIRVLKELIDKSRKVIEELLELLKRINEENLKVLAEIIK

SEQ ID NO: 27280 - protein, 235 aa, Artificial Sequence
  Synthetic
DEAKELLDEIRKAVKESEDRLEKLLRDYEKELRRLEKELRDLKRRIEEKLEELRRGSLDAKELLKTLEDLLREVLEVARRVVETLKELNRRVLEVVREDIERNERLLRRVLDTLRRGGVDERRIKDLERLIRESLKKAEEVLREAAEKSREIVDEIREVLKRADEALKRIIKKIRETRGADARDHMVLHEYVNAAGITRVLKELIDKSRKVIEELLELLKRINEENLKVLAEIIK

SEQ ID NO: 27281 - protein, 235 aa, Artificial Sequence
  Synthetic
DEAKELLDEIRKAVKESEDRLEKLLRDYEKELRRLEKELRDLKRRIEEKLEELRRGSLDAKELLKTLEDLLREVLEVARRVVETLKELNRRVLEVVREDIERNERLLRRVLDTLRRGGVDERRIKDLERLIRESLKKAEEVLREAAEKSREIVDEIREVLKRADEALKRIIKKIRETRGADALSRDHMVLHEYVNAAGITLKELIDKSRKVIEELLELLKRINEENLKVLAEIIK

SEQ ID NO: 27282 - protein, 235 aa, Artificial Sequence
  Synthetic
DEAKELLDEIRKAVKESEDRLEKLLRDYEKELRRLEKELRDLKRRIEEKLEELRRGSLDAKELLKTLEDLLREVLEVARRVVETLKELNRRVLEVVREDIERNERLLRRVLDTLRRGGVDERRIKDLERLIRESLKKAEEVLREAAEKSREIVDEIREVLKRADEALKRIIKKIRDHMVLHEYVNAAGITLRVVDDLIRVLKELIDKSRKVIEELLELLKRINEENLKVLAEIIK

SEQ ID NO: 27283 - protein, 242 aa, Artificial Sequence
  Synthetic
SEKEKLLKESEEEVRRLRRTLEELLRKYREVLERLRDHMVLHEYVNAAGITRLKEVLDRSGLDIDTIIKEVEDLLKTVLDRLRELLDKIARLTKEAIEVVREIIERIVRHAERVKDELRKGGADKRKLDRVDRLIKENTRHLKEILDRIEDLVRRSEKKLRDIIREVRRLIEELRKKAEEIKKDPDERLVKTLIEDVERVIKRILELITRVAEDNERVLERIIRELTDNLERHLKIVREIVK

SEQ ID NO: 27284 - protein, 235 aa, Artificial Sequence
  Synthetic
SEKEDLARKLRKLVEELTREYEELVKKLERLIEEIERDHMVLHEYVNAAGITISEEVRKLGTDERVLKRLLERLRRIIEEDHELNTELLKRLLDLLKEILDTSRELLKRLLDILRKGVRDEEVLRDLERTLREVLEENERAIEEAERVLRKVLEDSERAVRDARRVLAEVDKSPTGDEALRKLVELLVEVLRRLIRVNRELVKLLREVLERLLRILRESVKKLKRLIEKVIKDAT

SEQ ID NO: 27285 - protein, 235 aa, Artificial Sequence
  Synthetic
SEKEDLARKLRKLVEELTREYEELVKKLERLIEEIEKVSEESVRKLEKLLREISEEVRKLGTDERVLKRLLERLRRIIEEDHELNTELLKRLLDLLKEILDTSRELLKRLLDILRKGVRDEEVLRDLERTLREVLEENERAIEEAERVLRKVLEDSERAVRDARRVLAEVDKSPTGDEARDHMVLHEYVNAAGITRVNRELVKLLREVLERLLRILRESVKKLKRLIEKVIKDAT

SEQ ID NO: 27286 - protein, 235 aa, Artificial Sequence
  Synthetic
SEKEDLARKLRKLVEELTREYEELVKKLERLIEEIEKVSEESVRKLEKLLREISEEVRKLGTDERVLKRLLERLRRIIEEDHELNTELLKRLLDLLKEILDTSRELLKRLLDILRKGVRDEEVLRDLERTLREVLEENERAIEEAERVLRKVLEDSERAVRDARRVLAEVDKSPTGDERDHMVLHEYVNAAGITIRVNRELVKLLREVLERLLRILRESVKKLKRLIEKVIKDAT

SEQ ID NO: 27287 - protein, 235 aa, Artificial Sequence
  Synthetic
SEKEDLARKLRKLVEELTREYEELVKKLERLIEEIEKVSEESVRKLEKLLREISEEVRKLGTDERVLKRLLERLRRIIEEDHELNTELLKRLLDLLKEILDTSRELLKRLLDILRKGVRDEEVLRDLERTLREVLEENERAIEEAERVLRKVLEDSERAVRDARRVLAEVDKSPTGRDHMVLHEYVNAAGITRLIRVNRELVKLLREVLERLLRILRESVKKLKRLIEKVIKDAT

SEQ ID NO: 27288 - protein, 235 aa, Artificial Sequence
  Synthetic
SEKEDLARKLRKLVEELTREYEELVKKLERLIEEIRDHMVLHEYVNAAGITEISEEVRKLGTDERVLKRLLERLRRIIEEDHELNTELLKRLLDLLKEILDTSRELLKRLLDILRKGVRDEEVLRDLERTLREVLEENERAIEEAERVLRKVLEDSERAVRDARRVLAEVDKSPTGDEALRKLVELLVEVLRRLIRVNRELVKLLREVLERLLRILRESVKKLKRLIEKVIKDAT

SEQ ID NO: 27289 - protein, 235 aa, Artificial Sequence
  Synthetic
SEKEDLARKLRKLVEELTREYEELVKKLERLIEEIEKVSEESVRKLEKLLREISEEVRKLGTDERVLKRLLERLRRIIEEDHELNTELLKRLLDLLKEILDTSRELLKRLLDILRKGVRDEEVLRDLERTLREVLEENERAIEEAERVLRKVLEDSERAVRDARRVLAEVDKSPTRDHMVLHEYVNAAGITRRLIRVNRELVKLLREVLERLLRILRESVKKLKRLIEKVIKDAT

SEQ ID NO: 27290 - protein, 235 aa, Artificial Sequence
  Synthetic
SEKEDLARKLRKLVEELTREYEELVKKLERLIERDHMVLHEYVNAAGITLREISEEVRKLGTDERVLKRLLERLRRIIEEDHELNTELLKRLLDLLKEILDTSRELLKRLLDILRKGVRDEEVLRDLERTLREVLEENERAIEEAERVLRKVLEDSERAVRDARRVLAEVDKSPTGDEALRKLVELLVEVLRRLIRVNRELVKLLREVLERLLRILRESVKKLKRLIEKVIKDAT

SEQ ID NO: 27291 - protein, 235 aa, Artificial Sequence
  Synthetic
SEKEDLARKLRKLVEELTREYEELVKKLERLIEEIEKRDHMVLHEYVNAAGITSEEVRKLGTDERVLKRLLERLRRIIEEDHELNTELLKRLLDLLKEILDTSRELLKRLLDILRKGVRDEEVLRDLERTLREVLEENERAIEEAERVLRKVLEDSERAVRDARRVLAEVDKSPTGDEALRKLVELLVEVLRRLIRVNRELVKLLREVLERLLRILRESVKKLKRLIEKVIKDAT

SEQ ID NO: 27292 - protein, 235 aa, Artificial Sequence
  Synthetic
SEKEDLARKLRKLVEELTREYEELVKKLERLIEEIEKVSEESRDHMVLHEYVNAAGITKLGTDERVLKRLLERLRRIIEEDHELNTELLKRLLDLLKEILDTSRELLKRLLDILRKGVRDEEVLRDLERTLREVLEENERAIEEAERVLRKVLEDSERAVRDARRVLAEVDKSPTGDEALRKLVELLVEVLRRLIRVNRELVKLLREVLERLLRILRESVKKLKRLIEKVIKDAT

SEQ ID NO: 27293 - protein, 235 aa, Artificial Sequence
  Synthetic
SEKEDLARKLRKLVEELTREYEELVKKLERLIEEIEKVSEESVRDHMVLHEYVNAAGITLGTDERVLKRLLERLRRIIEEDHELNTELLKRLLDLLKEILDTSRELLKRLLDILRKGVRDEEVLRDLERTLREVLEENERAIEEAERVLRKVLEDSERAVRDARRVLAEVDKSPTGDEALRKLVELLVEVLRRLIRVNRELVKLLREVLERLLRILRESVKKLKRLIEKVIKDAT

SEQ ID NO: 27294 - protein, 242 aa, Artificial Sequence
  Synthetic
SEEEDLLERVKRVLDELIEIVDRNHELNRRVVETSAALVERLLEEVERALETLEREIPGSSLLDKAIKDLRDVLRRVKEKVKRSIEELKEVLEESRRVLEEVVRKLREVIDRVRRLVEKGVDLRDLIRELKRVLEEAVKLIERLVRLNTRAAEKDNESLRELVRAIKEALKRAVDAVRKGGLDSRAVKKLDRDHMVLHEYVNAAGITNEELWRALVELNKESVRRLREIVERVARDLEETAR

SEQ ID NO: 27295 - protein, 242 aa, Artificial Sequence
  Synthetic
SEEEDLLERVKRVLDELIEIVDRNHELNRRVVETSAALVERLLEEVERALETLEREIPGSSLLDKAIKDLRDVLRRVKEKVKRSIEELKEVLEESRRVLEEVVRKLREVIDRVRRLVEKGVDLRDLIRELKRVLEEAVKLIERLVRLNTRAAEKDNESLRELVRAIKEALKRAVDAVRKGGLDSRARDHMVLHEYVNAAGITDVVRRNEELWRALVELNKESVRRLREIVERVARDLEETAR

SEQ ID NO: 27296 - protein, 242 aa, Artificial Sequence
  Synthetic
SEEEDLLERVKRVLDELIEIVDRNHELNRRVVETSAALVERLLEEVERALETLEREIPGSSLLDKAIKDLRDVLRRVKEKVKRSIEELKEVLEESRRVLEEVVRKLREVIDRVRRLVEKGVDLRDLIRELKRVLEEAVKLIERLVRLNTRAAEKDNESLRELVRAIKEALKRAVDAVRKGGLDSRRDHMVLHEYVNAAGITEDVVRRNEELWRALVELNKESVRRLREIVERVARDLEETAR

SEQ ID NO: 27297 - protein, 242 aa, Artificial Sequence
  Synthetic
SEEEDLLERVKRVLDELIEIVDRNHELNRRVVETSAALVERLLEEVERALETLEREIPGSSLLDKAIKDLRDVLRRVKEKVKRSIEELKEVLEESRRVLEEVVRKLREVIDRVRRLVEKGVDLRDLIRELKRVLEEAVKLIERLVRLNTRAAEKDNESLRELVRAIKEALKRAVDAVRKGGLRDHMVLHEYVNAAGITKKLEDVVRRNEELWRALVELNKESVRRLREIVERVARDLEETAR

SEQ ID NO: 27298 - protein, 232 aa, Artificial Sequence
  Synthetic
DETEEVIKKIAKLIDELIETLKKIVEDSAKLIKELIDLLEEIIKRSADLIRELEKVSKRGDRDRLKKLIDRMRRETERALEELRRVIEELKEATERALKTIEDLIREIEEAIRRELGDEDLAREILEVIRRILELLREDMELNLRALEEILRLLEEVIKLNKDAIDEILELLKRDHMVLHEYVNAAGITESKKLVRDVVEEAKRLLKENRDSTRKIIEDIRRLLRKIEDSTR

SEQ ID NO: 27299 - protein, 232 aa, Artificial Sequence
  Synthetic
DETEEVIKKIAKLIDELIETLKKIVEDSAKLIKELIDLLEEIIKRSADLIRELEKVSKRGDRDRLKKLIDRMRRETERALEELRRVIEELKEATERALKTIEDLIREIEEAIRRELGDEDLAREILEVIRRILELLREDMELNLRALEEILRLLEEVIKLNKDAIDEILELLKGRDHMVLHEYVNAAGITSKKLVRDVVEEAKRLLKENRDSTRKIIEDIRRLLRKIEDSTR

SEQ ID NO: 27300 - protein, 234 aa, Artificial Sequence
  Synthetic
SKEETLRKEAEDLLRRLEELTRRLEKKARELLERAKKLSRDLARDHMVLHEYVNAAGITEELIKVLEEVAKTSIDLNKEVIDVIRRVIEESLELNKRVLDVLRRVLDIAARKGRDKKAIRDVVREAARVIKEVIDEDEKVNRDLKRVIERVIDDDRKALERLRKAVEEVASRGDDEAAKRLVEELLKAVTDLSRKNKRILEELLKAIETLSDENKKILTEILDALRRLVEKIEK

SEQ ID NO: 27301 - protein, 234 aa, Artificial Sequence
  Synthetic
SKEETLRKEAEDLLRRLEELTRRLEKKARELLERAKKLSRRDHMVLHEYVNAAGITGVPEELIKVLEEVAKTSIDLNKEVIDVIRRVIEESLELNKRVLDVLRRVLDIAARKGRDKKAIRDVVREAARVIKEVIDEDEKVNRDLKRVIERVIDDDRKALERLRKAVEEVASRGDDEAAKRLVEELLKAVTDLSRKNKRILEELLKAIETLSDENKKILTEILDALRRLVEKIEK

SEQ ID NO: 27302 - protein, 234 aa, Artificial Sequence
  Synthetic
SKEETLRKEAEDLLRRLEELTRRLEKKARELLERAKKLSRDLAEELKRLLKELREKGVPEELIKVLEEVAKTSIDLNKEVIDVIRRVIEESLELNKRVLDVLRRVLDIAARKGRDKKAIRDVVREAARVIKEVIDEDEKVNRDLKRVIERVIDDDRKALERLRKAVEEVASRGDDEARDHMVLHEYVNAAGITRKNKRILEELLKAIETLSDENKKILTEILDALRRLVEKIEK

SEQ ID NO: 27303 - protein, 234 aa, Artificial Sequence
  Synthetic
SKEETLRKEAEDLLRRLEELTRRLEKKARELLERARDHMVLHEYVNAAGITELREKGVPEELIKVLEEVAKTSIDLNKEVIDVIRRVIEESLELNKRVLDVLRRVLDIAARKGRDKKAIRDVVREAARVIKEVIDEDEKVNRDLKRVIERVIDDDRKALERLRKAVEEVASRGDDEAAKRLVEELLKAVTDLSRKNKRILEELLKAIETLSDENKKILTEILDALRRLVEKIEK

SEQ ID NO: 27304 - protein, 234 aa, Artificial Sequence
  Synthetic
SKEETLRKEAEDLLRRLEELTRRLEKKARELLERAKKLSRDHMVLHEYVNAAGITKGVPEELIKVLEEVAKTSIDLNKEVIDVIRRVIEESLELNKRVLDVLRRVLDIAARKGRDKKAIRDVVREAARVIKEVIDEDEKVNRDLKRVIERVIDDDRKALERLRKAVEEVASRGDDEAAKRLVEELLKAVTDLSRKNKRILEELLKAIETLSDENKKILTEILDALRRLVEKIEK

SEQ ID NO: 27305 - protein, 234 aa, Artificial Sequence
  Synthetic
SKEETLRKEAEDLLRRLEELTRRLEKKARELLERAKKLRDHMVLHEYVNAAGITEKGVPEELIKVLEEVAKTSIDLNKEVIDVIRRVIEESLELNKRVLDVLRRVLDIAARKGRDKKAIRDVVREAARVIKEVIDEDEKVNRDLKRVIERVIDDDRKALERLRKAVEEVASRGDDEAAKRLVEELLKAVTDLSRKNKRILEELLKAIETLSDENKKILTEILDALRRLVEKIEK

SEQ ID NO: 27306 - protein, 234 aa, Artificial Sequence
  Synthetic
SKEETLRKEAEDLLRRLEELTRRLEKKARELLERAKKLSRDLRDHMVLHEYVNAAGITPEELIKVLEEVAKTSIDLNKEVIDVIRRVIEESLELNKRVLDVLRRVLDIAARKGRDKKAIRDVVREAARVIKEVIDEDEKVNRDLKRVIERVIDDDRKALERLRKAVEEVASRGDDEAAKRLVEELLKAVTDLSRKNKRILEELLKAIETLSDENKKILTEILDALRRLVEKIEK

SEQ ID NO: 27307 - protein, 240 aa, Artificial Sequence
  Synthetic
SEREEVKEKLDRLLEEVEKTVRELKREHDELLKEVEKLVRDLKRDHMVLHEYVNAAGITKEILDVIREHVRTNKEILDRVLEVVEEHLRRNKEILDKLLDDIRKVVEDAKRILGIGDDETLRRAVRRILEELRKLVEDIRKKVKDSLETLERALEEAEERIRRSLEDLKRVLKEAKDKTKDKDRLDKVEELVKKLLEDTKRTVDRVRELVRKILKKSRETLEELERLIEKILRELEKDAR

SEQ ID NO: 27308 - protein, 240 aa, Artificial Sequence
  Synthetic
SEREEVKEKLDRLLEEVEKTVRELKREHDELLKEVEKLVRDLKKEHDELLKKVKDDGVPKEILDVIREHVRTNKEILDRVLEVVEEHLRRNKEILDKLLDDIRKVVEDAKRILGIGDDETLRRAVRRILEELRKLVEDIRKKVKDSLETLERALEEAEERIRRSLEDLKRVLKEAKDKTKDKDRDHMVLHEYVNAAGITKRTVDRVRELVRKILKKSRETLEELERLIEKILRELEKDAR

SEQ ID NO: 27309 - protein, 240 aa, Artificial Sequence
  Synthetic
SERETVKRRLEELLKEVKRTLDKLKEEHDRLLEDVRRVVEELRDHMVLHEYVNAAGITPEELLRVIAKVLETNKRILDDLLRVVKKHVDLNKEILDRILEMIKEIVERVKRVLGDGDEKTLRDKIRDIIRRLEDAAREAEERVRRSLEELKKAVEKIRKKIEDSLRELEEALKRVRDKEEDDKRLEDISRLVKRLLDESRRVLRELEETIRKRAEESKRVLEEVKRLVEKLIRELRKEAE

SEQ ID NO: 27310 - protein, 239 aa, Artificial Sequence
  Synthetic
SEDEIIKKIIEDLRRVLKEVEEIHKEVEERLDKRDHMVLHEYVNAAGITDRVLDEVKRIGDVETVLRLAIEAVRRALEIVRKVTEDLIRVVRKLLEIVDAVNKRVKKAVEDVLKLLRDTLKGSKDVERVLDEARRLLEKLHRDSRRILKRIAELLDELKELSERILERIKRLLEEVERRGSDDERLLEELIEELKDLIRRHIELLRRLIERLKELLKKHIEDLRRLLEEIEKLLEEARK

SEQ ID NO: 27311 - protein, 247 aa, Artificial Sequence
  Synthetic
SREEVLRELEEVIEDNRRLLEELIEKSKKVLDESLKLIDELLRRDHMVLHEYVNAAGITSKGDDEETARRIVTKIRKELEDVLDEVRRIVKEILDRDRRVAEDLKRVVDENLEKLKKVLDELDKKLGDRRLVEILRDIVRLLIEINERALRELLKLHEEHTRIVAELLRELERVVEELRRLVELIARGEISEDDLKRVVDEVEKKLRELKRRYKEALERIKEKIKELKDRYERAVREVVAELRKTTK

SEQ ID NO: 27312 - protein, 247 aa, Artificial Sequence
  Synthetic
SREEVLRELEEVIEDNRRLLEELIEKSKKVLDESLKLIDELLRRLEEVLERVLRLLEELSKGDDEETARRIVTKIRKELEDVLDEVRRIVKEILDRDRRVAEDLKRVVDENLEKLKKVLDELDKKLGDRRLVEILRDIVRLLIEINERALRELLKLHEEHTRIVAELLRELERVVEELRRLVELIARGEISEDDRDHMVLHEYVNAAGITRRYKEALERIKEKIKELKDRYERAVREVVAELRKTTK

SEQ ID NO: 27313 - protein, 247 aa, Artificial Sequence
  Synthetic
SREEVLRELEEVIEDNRRLLEELIEKSKKVLDESLKLIDELLRRLEEVLERVLRLLEELSKGDDEETARRIVTKIRKELEDVLDEVRRIVKEILDRDRRVAEDLKRVVDENLEKLKKVLDELDKKLGDRRLVEILRDIVRLLIEINERALRELLKLHEEHTRIVAELLRELERVVEELRRLVELIARGERDHMVLHEYVNAAGITLRELKRRYKEALERIKEKIKELKDRYERAVREVVAELRKTTK

SEQ ID NO: 27314 - protein, 230 aa, Artificial Sequence
  Synthetic
SKAEEIAEKLDRLLEENRRALEEITTRLDDLLRRDHMVLHEYVNAAGITLDDLRRGGIREELLKRIADVIRDIMRLLKELHDHTAEVIKTIKKLLKELHDINKEIIERLKRLKDGNVPKEELLKRVEELVRTSARLTTEVLKTVEKLIRDDKRLSEEILKRVKELIEELKRGVDSERVKEILERILRVVEEAVRLNEESLRRILDVVRKAVKLDRESLKKILDVVEEAVR

SEQ ID NO: 27315 - protein, 230 aa, Artificial Sequence
  Synthetic
SKAEEIAEKLDRLLEENRRALEEITTRLDDLLRRNKDALRKVMEKLKRLLDDLRRGGIREELLKRIADVIRDIMRLLKELHDHTAEVIKTIKKLLKELHDINKEIIERLKRLKDGNVPKEELLKRVEELVRTSARLTTEVLKTVEKLIRDDKRLSEEILKRVKELIEELRDHMVLHEYVNAAGITLRVVEEAVRLNEESLRRILDVVRKAVKLDRESLKKILDVVEEAVR

SEQ ID NO: 27316 - protein, 230 aa, Artificial Sequence
  Synthetic
SKAEEIAEKLDRLLEENRRALEEITTRLDDLLRRNKDRDHMVLHEYVNAAGITRRGGIREELLKRIADVIRDIMRLLKELHDHTAEVIKTIKKLLKELHDINKEIIERLKRLKDGNVPKEELLKRVEELVRTSARLTTEVLKTVEKLIRDDKRLSEEILKRVKELIEELKRGVDSERVKEILERILRVVEEAVRLNEESLRRILDVVRKAVKLDRESLKKILDVVEEAVR

SEQ ID NO: 27317 - protein, 230 aa, Artificial Sequence
  Synthetic
SKAEEIAEKLDRLLEENRRALEEITTRLDDLLRRNKDALRKVMEKLKRLLDDLRRGGIREELLKRIADVIRDIMRLLKELHDHTAEVIKTIKKLLKELHDINKEIIERLKRLKDGNVPKEELLKRVEELVRTSARLTTEVLKTVEKLIRDDKRLSEEILKRVKELIEELKRGRDHMVLHEYVNAAGITVEEAVRLNEESLRRILDVVRKAVKLDRESLKKILDVVEEAVR

SEQ ID NO: 27318 - protein, 230 aa, Artificial Sequence
  Synthetic
SKAEEIAEKLDRLLEENRRALEEITTRLDDLLRRNKRDHMVLHEYVNAAGITLRRGGIREELLKRIADVIRDIMRLLKELHDHTAEVIKTIKKLLKELHDINKEIIERLKRLKDGNVPKEELLKRVEELVRTSARLTTEVLKTVEKLIRDDKRLSEEILKRVKELIEELKRGVDSERVKEILERILRVVEEAVRLNEESLRRILDVVRKAVKLDRESLKKILDVVEEAVR

SEQ ID NO: 27319 - protein, 230 aa, Artificial Sequence
  Synthetic
SKAEEIAEKLDRLLEENRRALEEITTRLDDLLRRNKDALRDHMVLHEYVNAAGITGGIREELLKRIADVIRDIMRLLKELHDHTAEVIKTIKKLLKELHDINKEIIERLKRLKDGNVPKEELLKRVEELVRTSARLTTEVLKTVEKLIRDDKRLSEEILKRVKELIEELKRGVDSERVKEILERILRVVEEAVRLNEESLRRILDVVRKAVKLDRESLKKILDVVEEAVR

SEQ ID NO: 27320 - protein, 243 aa, Artificial Sequence
  Synthetic
SRVEELKKLIEDILRISREVVERIKRVAEDIHRINRRVLDDLRKLIEDILRTVEEILARKVGDTEIAERLRDTIARVVDEIAKLLEEHEKRSRELLEEIRKLLEDILRRSERAVEEIRELLKKGVSTKDVLRIIEEILREHLELLERVVRRIEEILRELLKTIEEIVKRIKEILEELKEVLKRGRVKDDEVERDHMVLHEYVNAAGITYRRLLEEIKRKLEEILRRVEELHRRLRRKLEEIDR

SEQ ID NO: 27321 - protein, 243 aa, Artificial Sequence
  Synthetic
SRVEELKKLIEDILRISREVVERIKRVAEDIHRINRRVRDHMVLHEYVNAAGITEILARKVGDTEIAERLRDTIARVVDEIAKLLEEHEKRSRELLEEIRKLLEDILRRSERAVEEIRELLKKGVSTKDVLRIIEEILREHLELLERVVRRIEEILRELLKTIEEIVKRIKEILEELKEVLKRGRVKDDEVEREIRRVKEDLDRILEEYRRLLEEIKRKLEEILRRVEELHRRLRRKLEEIDR

SEQ ID NO: 27322 - protein, 58 aa, Artificial Sequence; identical to SEQ ID NO: 26719
  Synthetic

SEQ ID NO: 27323 - protein, 58 aa, Artificial Sequence
  Synthetic
RGADALSRLLEELLRVVDDLIRVLKELIDKSRKVIEELLELLKRINEENLKVLAEIIK

SEQ ID NO: 27324 - protein, 58 aa, Artificial Sequence; identical to SEQ ID NO: 26723
  Synthetic

SEQ ID NO: 27325 - protein, 58 aa, Artificial Sequence; identical to SEQ ID NO: 26720
  Synthetic

SEQ ID NO: 27326 - protein, 58 aa, Artificial Sequence; identical to SEQ ID NO: 26703
  Synthetic

SEQ ID NO: 27327 - protein, 58 aa, Artificial Sequence; identical to SEQ ID NO: 26710
  Synthetic

SEQ ID NO: 27328 - protein, 58 aa, Artificial Sequence
  Synthetic
SDERRIAERIRELLRESKKLVRDVVEEAKRLLKENRDSTRKIIEDIRRLLRKIEDSTR

SEQ ID NO: 27329 - protein, 58 aa, Artificial Sequence; identical to SEQ ID NO: 26725
  Synthetic

SEQ ID NO: 27330 - protein, 58 aa, Artificial Sequence; identical to SEQ ID NO: 26705
  Synthetic

SEQ ID NO: 27331 - protein, 58 aa, Artificial Sequence; identical to SEQ ID NO: 26740
  Synthetic

SEQ ID NO: 27332 - protein, 58 aa, Artificial Sequence; identical to SEQ ID NO: 26711
  Synthetic

SEQ ID NO: 27333 - protein, 58 aa, Artificial Sequence; identical to SEQ ID NO: 26737
  Synthetic

SEQ ID NO: 27334 - protein, 58 aa, Artificial Sequence; identical to SEQ ID NO: 26721
  Synthetic

SEQ ID NO: 27335 - protein, 58 aa, Artificial Sequence; identical to SEQ ID NO: 26741
  Synthetic

SEQ ID NO: 27336 - protein, 58 aa, Artificial Sequence
  Synthetic
ISEDDLKRVVDEVEKKLRELKRRYAEALERIKEKIKELKDRYERAVREVVAELRKTTK

SEQ ID NO: 27337 - protein, 58 aa, Artificial Sequence; identical to SEQ ID NO: 26722
  Synthetic

SEQ ID NO: 27338 - protein, 58 aa, Artificial Sequence
  Synthetic
VDSERVKEILERILRVVEEAVRLNEESLRRILDVVRKAVKLDRESLKKILDVVEEAVR

SEQ ID NO: 27339 - protein, 58 aa, Artificial Sequence
  Synthetic
VKDDEVEREIRRVKEDLDRILEEYRRLLEEIKRKLEEILRRVEELHRRLRRKLEEIDR

SEQ ID NO: 27340 - protein, 58 aa, Artificial Sequence; identical to SEQ ID NO: 26731
  Synthetic

SEQ ID NO: 27341 - protein, 58 aa, Artificial Sequence; identical to SEQ ID NO: 27323
  Synthetic

SEQ ID NO: 27342 - protein, 58 aa, Artificial Sequence; identical to SEQ ID NO: 27323
  Synthetic

SEQ ID NO: 27343 - protein, 58 aa, Artificial Sequence; identical to SEQ ID NO: 26703
  Synthetic

SEQ ID NO: 27344 - protein, 58 aa, Artificial Sequence; identical to SEQ ID NO: 26720
  Synthetic

SEQ ID NO: 27345 - protein, 58 aa, Artificial Sequence; identical to SEQ ID NO: 26720
  Synthetic

SEQ ID NO: 27346 - protein, 58 aa, Artificial Sequence; identical to SEQ ID NO: 26720
  Synthetic

SEQ ID NO: 27347 - protein, 58 aa, Artificial Sequence; identical to SEQ ID NO: 26710
  Synthetic

SEQ ID NO: 27348 - protein, 58 aa, Artificial Sequence; identical to SEQ ID NO: 26710
  Synthetic

SEQ ID NO: 27349 - protein, 58 aa, Artificial Sequence; identical to SEQ ID NO: 26710
  Synthetic

SEQ ID NO: 27350 - protein, 58 aa, Artificial Sequence; identical to SEQ ID NO: 27328
  Synthetic

SEQ ID NO: 27351 - protein, 58 aa, Artificial Sequence; identical to SEQ ID NO: 26725
  Synthetic

SEQ ID NO: 27352 - protein, 58 aa, Artificial Sequence; identical to SEQ ID NO: 26725
  Synthetic

SEQ ID NO: 27353 - protein, 58 aa, Artificial Sequence; identical to SEQ ID NO: 26725
  Synthetic

SEQ ID NO: 27354 - protein, 58 aa, Artificial Sequence; identical to SEQ ID NO: 27336
  Synthetic

SEQ ID NO: 27355 - protein, 58 aa, Artificial Sequence; identical to SEQ ID NO: 26722
  Synthetic

SEQ ID NO: 27356 - protein, 58 aa, Artificial Sequence; identical to SEQ ID NO: 27338
  Synthetic

SEQ ID NO: 27357 - protein, 58 aa, Artificial Sequence; identical to SEQ ID NO: 26722
  Synthetic

SEQ ID NO: 27358 - protein, 58 aa, Artificial Sequence; identical to SEQ ID NO: 26722
  Synthetic

SEQ ID NO: 27359 - protein, 288 aa, Artificial Sequence
  Synthetic peptide
  MISC_FEATURE (259)..(288): Optional residues
SELARKLLEASTKLQRLNIRLAEALLEAIARLQELNLELVYLAVELTDPKRIRDEIKEVKDKSKEIIRRAEKEIDDAAKESEKILEEAREAISGSGSELAKLLLKAIAETQDLNLRAAKAFLEAAAKLQELNIRAVELLVKLTDPATIREALEHAKRRSKEIIDEAERAIRAAKRESERIIEEARRLIEKGSGSGSELARELLRAHAQLQRLNLELLRELLRALAQLQELNLDLLRLASELTDEIWIAQELRRIGDEFNAYYADAERLIREAAAASEKISREAERLIR

SEQ ID NO: 27360 - protein, 284 aa, Artificial Sequence
  Synthetic peptide
  MISC_FEATURE (242)..(284): Optional residues
SELARKLLEASTKLQRLNIRLAEALLEAIARLQELNLELVYLAVELTDPKRIRDEIKEVKDKSKEIIRRAEKEIDDAAKESEKILEEAREAISGSGSELAKLLLKAIAETQDLNLRAAKAFLEAAAKLQELNIRAVELLVKLTDPATIREALEHAKRRSKEIIDEAERAIRAAKRESERIIEEARRLIEKGSGSGSELARELLRAHAQLQRLNLELLRELLRALAQLQELNLDLLRLASELRDHMVLHEYVNAAGITFNAYYADAERLIREAAAASEKISREAG

SEQ ID NO: 27361 - protein, 288 aa, Artificial Sequence
  Synthetic peptide
  MISC_FEATURE (242)..(288): Optional residues
SELARKLLEASTKLQRLNIRLAEALLEAIARLQELNLELVYLAVELTDPKRIRDEIKEVKDKSKEIIRRAEKEIDDAAKESEKILEEAREAISGSGSELAKLLLKAIAETQDLNLRAAKAFLEAAAKLQELNIRAVELLVKLTDPATIREALEHAKRRSKEIIDEAERAIRAAKRESERIIEEARRLIEKGSGSGSELARELLRAHAQLQRLNLELLRELLRALAQLQELNLDLLRLASELRDHMVLHEYVNAAGITFNAYYADAERLIREAAAASEKISREAERLIR

SEQ ID NO: 27362 - protein, 288 aa, Artificial Sequence
  Synthetic peptide
  MISC_FEATURE (242)..(288): Optional residues
SELARKLLEASTKLQRLNIRLAEALLEAIARLQELNLELVYLAVELTDPKRIRDEIKEVKDKSKEIIRRAEKEIDDAAKESEKILEEAREAISGSGSELAKLLLKAIAETQDLNLRAAKAFLEAAAKLQELNIRAVELLVKLTDPATIREALEHAKRRSKEIIDEAERAIRAAKRESERIIEEARRLIEKGSGSGSELARELLRAHAQLQRLNLELLRELLRALAQLQELNLDLLRLASELTDPDEARKAIARVKRESNAYYADAERLIREAAAASEKISREAERLIR

SEQ ID NO: 27363 - protein, 289 aa, Artificial Sequence
  Synthetic peptide
  MISC_FEATURE (243)..(289)
SELARKLLEASTKLQRLNIRLAEALLEAIARLQELNLELVYLAVELTDPKRIRDEIKEVKDKSKEIIRRAEKEIDDAAKESEKILEEAREAISGSGSELAKLLLKAIAETQDLNLRAAKAFLEAAAKLQELNIRAVELLVKLTDPATIREALEHAKRRSKEIIDEAERAIRAAKRESERIIEEARRLIEKGSGSGSELARELLRAHAQLQRLNLELLRELLRALAQLQELNLDLLRLASELGTDPDEARKAIARVKRESNAYYADAERLIREAAAASEKISREAERLIR

SEQ ID NO: 27364 - protein, 284 aa, Artificial Sequence; identical to SEQ ID NO: 27360
  Synthetic peptide
  MISC_FEATURE (242)..(284): Optional residues

SEQ ID NO: 27365 - protein, 288 aa, Artificial Sequence
  Synthetic peptide
  MISC_FEATURE (242)..(288): Optional residues
SELARKLLEASTKLQRLNIRLAEALLEAIARLQELNLELVYLAVELTDPKRIRDEIKEVKDKSKEIIRRAEKEIDDAAKESEKILEEAREAISGSGSELAKLLLKAIAETQDLNLRAAKAFLEAAAKLQELNIRAVELLVKLTDPATIREALEHAKRRSKEIIDEAERAIRAAKRESERIIEEARRLIEKGSGSGSELARELLRAHAQLQRLNLELLRELLRALAQLQELNLDLLRLASELTDEIWIAQELRRIGDEFNAYYADAERLIREAAAASEKISREAERLAR

SEQ ID NO: 27366 - protein, 288 aa, Artificial Sequence
  Synthetic peptide
  MISC_FEATURE (242)..(288): Optional residues
SELARKLLEASTKLQRLNIRLAEALLEAIARLQELNLELVYLAVELTDPKRIRDEIKEVKDKSKEIIRRAEKEIDDAAKESEKILEEAREAISGSGSELAKLLLKAIAETQDLNLRAAKAFLEAAAKLQELNIRAVELLVKLTDPATIREALEHAKRRSKEIIDEAERAIRAAKRESERIIEEARRLIEKGSGSGSELARELLRAHAQLQRLNLELLRELLRALAQLQELNLDLLRLASELTDEIWIAQELRRIGDEFNAYYADAERLSREAAAASEKISREAERLIR

SEQ ID NO: 27367 - protein, 288 aa, Artificial Sequence; identical to SEQ ID NO: 27366
  Synthetic peptide

SEQ ID NO: 27368 - protein, 288 aa, Artificial Sequence
  Synthetic peptide
  MISC_FEATURE (242)..(288): Optional residues
SELARKLLEASTKLQRLNIRLAEALLEAIARLQELNLELVYLAVELTDPKRIRDEIKEVKDKSKEIIRRAEKEIDDAAKESEKILEEAREAISGSGSELAKLLLKAIAETQDLNLRAAKAFLEAAAKLQELNIRAVELLVKLTDPATIREALEHAKRRSKEIIDEAERAIRAAKRESERIIEEARRLIEKGSGSGSELARELLRAHAQAQRLNLELLRELLRALAQLQELNLDLLRLASELTDEIWIAQELRRIGDEFNAYYADAERLIREAAAASEKISREAERLIR

SEQ ID NO: 27369 - protein, 285 aa, Artificial Sequence
  Synthetic peptide
  MISC_FEATURE (242)..(285): Optional residues
SELARKLLEASTKLQRLNIRLAEALLEAIARLQELNLELVYLAVELTDPKRIRDEIKEVKDKSKEIIRRAEKEIDDAAKESEKILEEAREAISGSGSELAKLLLKAIAETQDLNLRAAKAFLEAAAKLQELNIRAVELLVKLTDPATIREALEHAKRRSKEIIDEAERAIRAAKRESERIIEEARRLIEKGSGSGSELARELLRAHAQLQRLNLELLRELLRALAQLQELNLDLLRLASELRDHMVLHEYVNAAGITFNAYYADAERLIREAAAASEKISREAER

SEQ ID NO: 27370 - protein, 288 aa, Artificial Sequence
  Synthetic peptide
  MISC_FEATURE (242)..(288): Optional residues
SELARKLLEASTKLQRLNIRLAEALLEAIARLQELNLELVYLAVELTDPKRIRDEIKEVKDKSKEIIRRAEKEIDDAAKESEKILEEAREAISGSGSELAKLLLKAIAETQDLNLRAAKAFLEAAAKLQELNIRAVELLVKLTDPATIREALEHAKRRSKEIIDEAERAIRAAKRESERIIEEARRLIEKGSGSGSELARELLRAHAQLQRLNLELLRELLRALAQLQELNLDLLRLASELTDPDEARKAIARVKRESNAYYADAERLSREAAAASEKISREAERLIR

SEQ ID NO: 27371 - protein, 288 aa, Artificial Sequence; identical to SEQ ID NO: 27362
  Synthetic peptide
  MISC_FEATURE (242)..(288): Optional residues

SEQ ID NO: 27372 - protein, 288 aa, Artificial Sequence
  Synthetic peptide
  MISC_FEATURE (242)..(288): Optional residues
SELARKLLEASTKLQRLNIRLAEALLEAIARLQELNLELVYLAVELTDPKRIRDEIKEVKDKSKEIIRRAEKEIDDAAKESEKILEEAREAISGSGSELAKLLLKAIAETQDLNLRAAKAFLEAAAKLQELNIRAVELLVKLTDPATIREALEHAKRRSKEIIDEAERAIRAAKRESERIIEEARRLIEKGSGSGSELARELLRAHAQLQRLNLELLRELLRALAQLQELNLDLLRLASELTDEIWIAQELRRIGDEFNAYYADAERLIREAAAASEKISREAERLSR

SEQ ID NO: 27373 - protein, 288 aa, Artificial Sequence
  Synthetic peptide
  MISC_FEATURE (242)..(288): Optional residues
SELARKLLEASTKLQRLNIRLAEALLEAIARLQELNLELVYLAVELTDPKRIRDEIKEVKDKSKEIIRRAEKEIDDAAKESEKILEEAREAISGSGSELAKLLLKAIAETQDLNLRAAKAFLEAAAKLQELNIRAVELLVKLTDPATIREALEHAKRRSKEIIDEAERAIRAAKRESERIIEEARRLIEKGSGSGSELARELLRAHAQLQRLNLELLRELLRALAQLQELNLDLLRLASELTDEIWIAQELRRIGDEFNAYYADAERLSREAAAASEKISREAERLAR

SEQ ID NO: 27374 - protein, 288 aa, Artificial Sequence
  Synthetic peptide
  MISC_FEATURE (242)..(288): Optional residues
SELARKLLEASTKLQRLNIRLAEALLEAIARLQELNLELVYLAVELTDPKRIRDEIKEVKDKSKEIIRRAEKEIDDAAKESEKILEEAREAISGSGSELAKLLLKAIAETQDLNLRAAKAFLEAAAKLQELNIRAVELLVKLTDPATIREALEHAKRRSKEIIDEAERAIRAAKRESERIIEEARRLIEKGSGSGSELARELLRAHAQLQRLNLELLRELLRALAQLQELNLDLLRLASELTDEIWIAQELRRIGDEFNAYYADAERLSREAAAASEKISREAERLSR

SEQ ID NO: 27375 - protein, 288 aa, Artificial Sequence
  Synthetic peptide
  MISC_FEATURE (242)..(288): Optional residues
SELARKLLEASTKLQRLNIRLAEALLEAIARLQELNLELVYLAVELTDPKRIRDEIKEVKDKSKEIIRRAEKEIDDAAKESEKILEEAREAISGSGSELAKLLLKAIAETQDLNLRAAKAFLEAAAKLQELNIRAVELLVKLTDPATIREALEHAKRRSKEIIDEAERAIRAAKRESERIIEEARRLIEKGSGSGSELARELLRAHAQAQRLNLEALRELLRALAQLQELNLDLLRLASELTDEIWIAQELRRIGDEFNAYYADAERLIREAAAASEKISREAERLIR

SEQ ID NO: 27376 - protein, 284 aa, Artificial Sequence; identical to SEQ ID NO: 27360
  Synthetic peptide
  MISC_FEATURE (242)..(284): Optional residues

SEQ ID NO: 27377 - protein, 285 aa, Artificial Sequence
  Synthetic peptide
  MISC_FEATURE (242)..(285): Optional residues
SELARKLLEASTKLQRLNIRLAEALLEAIARLQELNLELVYLAVELTDPKRIRDEIKEVKDKSKEIIRRAEKEIDDAAKESEKILEEAREAISGSGSELAKLLLKAIAETQDLNLRAAKAFLEAAAKLQELNIRAVELLVKLTDPATIREALEHAKRRSKEIIDEAERAIRAAKRESERIIEEARRLIEKGSGSGSELARELLRAHAQLQRLNLELLRELLRALAQLQELNLDLLRLASELGRDHMVLHEYVNAAGITFNAYYADAERLIREAAAASEKISREAG

SEQ ID NO: 27378 - protein, 284 aa, Artificial Sequence
  Synthetic peptide
  MISC_FEATURE (242)..(284): Optional residues
SELARKLLEASTKLQRLNIRLAEALLEAIARLQELNLELVYLAVELTDPKRIRDEIKEVKDKSKEIIRRAEKEIDDAAKESEKILEEAREAISGSGSELAKLLLKAIAETQDLNLRAAKAFLEAAAKLQELNIRAVELLVKLTDPATIREALEHAKRRSKEIIDEAERAIRAAKRESERIIEEARRLIEKGSGSGSELARELLRAHAQLQRLNLELLRELLRALAQLQELNLDLLRLASELRDHMVLHEYVNAAGITFNAYYADAERLSREAAAASEKISREAG

SEQ ID NO: 27379 - protein, 285 aa, Artificial Sequence
  Synthetic peptide
  MISC_FEATURE (242)..(285): Optional residues
SELARKLLEASTKLQRLNIRLAEALLEAIARLQELNLELVYLAVELTDPKRIRDEIKEVKDKSKEIIRRAEKEIDDAAKESEKILEEAREAISGSGSELAKLLLKAIAETQDLNLRAAKAFLEAAAKLQELNIRAVELLVKLTDPATIREALEHAKRRSKEIIDEAERAIRAAKRESERIIEEARRLIEKGSGSGSELARELLRAHAQLQRLNLELLRELLRALAQLQELNLDLLRLASELGTDPDEARKAIARVKRESNAYYADAERLSREAAAASEKISREAG

SEQ ID NO: 27380 - protein, 286 aa, Artificial Sequence
  Synthetic peptide
  MISC_FEATURE (242)..(286): Optional residues
SELARKLLEASTKLQRLNIRLAEALLEAIARLQELNLELVYLAVELTDPKRIRDEIKEVKDKSKEIIRRAEKEIDDAAKESEKILEEAREAISGSGSELAKLLLKAIAETQDLNLRAAKAFLEAAAKLQELNIRAVELLVKLTDPATIREALEHAKRRSKEIIDEAERAIRAAKRESERIIEEARRLIEKGSGSGSELARELLRAHAQLQRLNLELLRELLRALAQLQELNLDLLRLASELGTDPDEARKAIARVKRESNAYYADAERLSREAAAASEKISREAER

SEQ ID NO: 27381 - protein, 288 aa, Artificial Sequence
  Synthetic peptide
  MISC_FEATURE (242)..(288): Optional residues
SELARKLLEASTKLQRLNIRLAEALLEAIARLQELNLELVYLAVELTDPKRIRDEIKEVKDKSKEIIRRAEKEIDDAAKESEKILEEAREAISGSGSELAKLLLKAIAETQDLNLRAAKAFLEAAAKLQELNIRAVELLVKLTDPATIREALEHAKRRSKEIIDEAERAIRAAKRESERIIEEARRLIEKGSGSGSELARELLRAHAQLQRLNLELLRELLRALAQLQELNLDLLRLASELGTDPDEARKAIARVKRESNAYYADAERLSREAAAASEKISREAERLI

SEQ ID NO: 27382 - protein, 289 aa, Artificial Sequence
  Synthetic peptide
  MISC_FEATURE (242)..(289): Optional residues
SELARKLLEASTKLQRLNIRLAEALLEAIARLQELNLELVYLAVELTDPKRIRDEIKEVKDKSKEIIRRAEKEIDDAAKESEKILEEAREAISGSGSELAKLLLKAIAETQDLNLRAAKAFLEAAAKLQELNIRAVELLVKLTDPATIREALEHAKRRSKEIIDEAERAIRAAKRESERIIEEARRLIEKGSGSGSELARELLRAHAQLQRLNLELLRELLRALAQLQELNLDLLRLASELGTDPDEARKAIARVKRESNAYYADAERLSREAAAASEKISREAERLIR

SEQ ID NO: 27383 - protein, 289 aa, Artificial Sequence; identical to SEQ ID NO: 27363
  Synthetic peptide
  MISC_FEATURE (242)..(289): Optional residues

SEQ ID NO: 27384 - protein, 289 aa, Artificial Sequence
  Synthetic peptide
  MISC_FEATURE (242)..(289): Optional residues
SELARKLLEASTKLQRLNIRLAEALLEAIARLQELNLELVYLAVELTDPKRIRDEIKEVKDKSKEIIRRAEKEIDDAAKESEKILEEAREAISGSGSELAKLLLKAIAETQDLNLRAAKAFLEAAAKLQELNIRAVELLVKLTDPATIREALEHAKRRSKEIIDEAERAIRAAKRESERIIEEARRLIEKGSGSGSELARELLRAHAQLQRLNLELLRELLRALAQLQELNLDLLRLASELGTDPDEARKAIARVKRESNAYYADAERLSREAAAASEKISREAERLAR

SEQ ID NO: 27385 - protein, 289 aa, Artificial Sequence
  Synthetic peptide
  MISC_FEATURE (284)..(289): Optional residues
SELARKLLEASTKLQRLNIRLAEALLEAIARLQELNLELVYLAVELTDPKRIRDEIKEVKDKSKEIIRRAEKEIDDAAKESEKILEEAREAISGSGSELAKLLLKAIAETQDLNLRAAKAFLEAAAKLQELNIRAVELLVKLTDPATIREALEHAKRRSKEIIDEAERAIRAAKRESERIIEEARRLIEKGSGSGSELARELLRAHAQLQRLNLELLRELLRALAQLQELNLDLLRLASELGTDPDEARKAIARVKRESNAYYADAERLIREAAAASEKISREAERLAR

SEQ ID NO: 27386 - protein, 288 aa, Artificial Sequence
  Synthetic peptide
  MISC_FEATURE (242)..(288): Optional residues
SELARKLLEASTKLQRLNIRLAEALLEAIARLQELNLELVYLAVELTDPKRIRDEIKEVKDKSKEIIRRAEKEIDDAAKESEKILEEAREAISGSGSELAKLLLKAIAETQDLNLRAAKAFLEAAAKLQELNIRAVELLVKLTDPATIREALEHAKRRSKEIIDEAERAIRAAKRESERIIEEARRLIEKGSGSGSELARELLRAHAQLQRLNLELLRELLRALAQLQELNLDLLRLASELTDPDEARKAIARVKRESNAYYADAERLSREAAAASEKISREAERLAR

SEQ ID NO: 27387 - protein, 298 aa, Artificial Sequence
  Synthetic peptide
  MISC_FEATURE (242)..(298): Optional residues
  MISC_FEATURE (245)..(245): Xaa is D or N
SELARKLLEASTKLQRLNIRLAEALLEAIARLQELNLELVYLAVELTDPKRIRDEIKEVKDKSKEIIRRAEKEIDDAAKESEKILEEAREAISGSGSELAKLLLKAIAETQDLNLRAAKAFLEAAAKLQELNIRAVELLVKLTDPATIREALEHAKRRSKEIIDEAERAIRAAKRESERIIEEARRLIEKGSGSGSELARELLRAHAQLQRLNLELLRELLRALAQLQELNLDLLRLASELGSEXLYFQGSTDPDEARKAIARVKRESNAYYADAERLSREAAAASEKISREAERLAR

SEQ ID NO: 27388 - protein, 298 aa, Artificial Sequence
  Synthetic peptide
  MISC_FEATURE (242)..(298): Optional residues
  MISC_FEATURE (245)..(245): Xaa is D or N
SELARKLLEASTKLQRLNIRLAEALLEAIARLQELNLELVYLAVELTDPKRIRDEIKEVKDKSKEIIRRAEKEIDDAAKESEKILEEAREAISGSGSELAKLLLKAIAETQDLNLRAAKAFLEAAAKLQELNIRAVELLVKLTDPATIREALEHAKRRSKEIIDEAERAIRAAKRESERIIEEARRLIEKGSGSGSELARELLRAHAQLQRLNLELLRELLRALAQLQELNLDLLRLASELGSEXLYFQGSTDPDEARKAIARVKRESNAYYADAERLSREAAAASEKISREAERLIR

SEQ ID NO: 27389 - protein, 298 aa, Artificial Sequence
  Synthetic peptide
  MISC_FEATURE (242)..(298): Optional residues
  MISC_FEATURE (245)..(245): Xaa is D or N
SELARKLLEASTKLQRLNIRLAEALLEAIARLQELNLELVYLAVELTDPKRIRDEIKEVKDKSKEIIRRAEKEIDDAAKESEKILEEAREAISGSGSELAKLLLKAIAETQDLNLRAAKAFLEAAAKLQELNIRAVELLVKLTDPATIREALEHAKRRSKEIIDEAERAIRAAKRESERIIEEARRLIEKGSGSGSELARELLRAHAQLQRLNLELLRELLRALAQLQELNLDLLRLASELGSEXLYFQGSTDPDEARKAIARVKRESNAYYADAERLIREAAAASEKISREAERLAR

SEQ ID NO: 27390 - protein, 298 aa, Artificial Sequence
  Synthetic peptide
  MISC_FEATURE (242)..(298): Optional residues
  MISC_FEATURE (245)..(245): Xaa is D or N
SELARKLLEASTKLQRLNIRLAEALLEAIARLQELNLELVYLAVELTDPKRIRDEIKEVKDKSKEIIRRAEKEIDDAAKESEKILEEAREAISGSGSELAKLLLKAIAETQDLNLRAAKAFLEAAAKLQELNIRAVELLVKLTDPATIREALEHAKRRSKEIIDEAERAIRAAKRESERIIEEARRLIEKGSGSGSELARELLRAHAQLQRLNLELLRELLRALAQLQELNLDLLRLASELGSEXLYFQGSTDPDEARKAIARVKRESNAYYADAERLIREAAAASEKISREAERLIR

SEQ ID NO: 27391 - protein, 289 aa, Artificial Sequence
  Synthetic peptide
  MISC_FEATURE (242)..(289): Optional residues
SELARKLLEASTKLQRLNIRLAEALLEAIARLQELNLELVYLAVELTDPKRIRDEIKEVKDKSKEIIRRAEKEIDDAAKESEKILEEAREAISGSGSELAKLLLKAIAETQDLNLRAAKAFLEAAAKLQELNIRAVELLVKLTDPATIREALEHAKRRSKEIIDEAERAIRAAKRESERIIEEARRLIEKGSGSGSELARELLRAHAQLQRLNLELLRELLRALAQLQELNLDLLRLASELGTDPDEARKAIARVKRESNAYYADAERLSREAAAASEKISREAERLSR

SEQ ID NO: 27392 - protein, 289 aa, Artificial Sequence
  Synthetic peptide
  MISC_FEATURE (242)..(289): Optional residues
SELARKLLEASTKLQRLNIRLAEALLEAIARLQELNLELVYLAVELTDPKRIRDEIKEVKDKSKEIIRRAEKEIDDAAKESEKILEEAREAISGSGSELAKLLLKAIAETQDLNLRAAKAFLEAAAKLQELNIRAVELLVKLTDPATIREALEHAKRRSKEIIDEAERAIRAAKRESERIIEEARRLIEKGSGSGSELARELLRAHAQLQRLNLEALRELLRALAQLQELNLDLLRLASELGTDPDEARKAIARVKRESNAYYADAERLSREAAAASEKISREAERLIR

SEQ ID NO: 27393 - protein, 44 aa, Artificial Sequence
  Synthetic peptide
  MISC_FEATURE (1)..(9): Optional residues
  MISC_FEATURE (38)..(44): Optional residues
DEARKAIARVKRESKRIVEDAERLIREAAAASEKISREAERLIR

SEQ ID NO: 27394 - protein, 41 aa, Artificial Sequence
  Synthetic peptide
DEAIARVKRESKRIVEDAERLIREAAAASEKISREAERLIR

SEQ ID NO: 27395 - protein, 37 aa, Artificial Sequence
  Synthetic peptide
DEVKRESKRIVEDAERLIREAAAASEKISREAERLIR

SEQ ID NO: 27396 - protein, 41 aa, Artificial Sequence
  Synthetic peptide
DEARKAIARVKRESKRIVEDAERLIREAAAASEKISREAER

SEQ ID NO: 27397 - protein, 37 aa, Artificial Sequence
  Synthetic peptide
DEARKAIARVKRESKRIVEDAERLIREAAAASEKISR

SEQ ID NO: 27398 - protein, 44 aa, Artificial Sequence
  Synthetic peptide
DEARKAIARVKRESKRIVEDAERLIREAAAASEKSSREAERLAR

SEQ ID NO: 27399 - protein, 124 aa, Artificial Sequence
  Synthetic peptide
DLGKKLLEAARAGQDDEVRILMANGADVNAKDEYGLTPLYLATAHGHLEIVEVLLKNGADVNAVDAIGFTPLHLAAFIGHLEIAEVLLKHGADVNAQDKFGKTAFDISIGNGNEDLAEILQKLN

SEQ ID NO: 27400 - protein, 156 aa, Artificial Sequence
  Synthetic peptide
DLGKKLLEAARAGQDDEVRILMANGADVNADDTWGWTPLHLAAYQGHLEIVEVLLKNGADVNAYDYIGWTPLHLAADGHLEIVEVLLKNGADVNASDYIGDTPLHLAAHNGHLEIVEVLLKHGADVNAQDKFGKTAFDISIDNGNEDLAEILQKLN

SEQ ID NO: 27401 - protein, 158 aa, Artificial Sequence
  Synthetic peptide
DLGKKLLEAARAGQDDEVRILVANGADVNAYFGTTPLHLAAAHGRLEIVEVLLKNGADVNAQDVWGITPLHLAAYNGHLEIVEVLLKYGADVNAHDTRGWTPLHLAAINGHLEIVEVLLKNVADVNAQDRSGKTPFDLAIDNGNEDIAEVLQKAAKLN

SEQ ID NO: 27402 - protein, 243 aa, Artificial Sequence
  Synthetic peptide
DIQMTQSPSSLSASVGDRVTITCRASQDVNTAVAWYQQKPGKAPKLLIYSASFLYSGVPSRFSGSRSGTDFTLTISSLQPEDFATYYCQQHYTTPPTFGQGTKVEIKGSTSGSGKPGSGEGSGEVQLVESGGGLVQPGGSLRLSCAASGFNIKDTYIHWVRQAPGKGLEWVARIYPTNGYTRYADSVKGRFTISADTSKNTAYLQMNSLRAEDTAVYYCSRWGGDGFYAMDYWGQGTLVTVSS

SEQ ID NO: 27403 - protein, 243 aa, Artificial Sequence
  Synthetic peptide
QVQLKQSGPGLVQPSQSLSITCTVSGFSLTNYGVHWVRQSPGKGLEWLGVIWSGGNTDYNTPFTSRLSINKDNSKSQVFFKMNSLQSNDTAIYYCARALTYYDYEFAYWGQGTLVTVSAGGGGSGGGGSGGGGSDILLTQSPVILSVSPGERVSFSCRASQSIGTNIHWYQQRTNGSPRLLIKYASESISGIPSRFSGSGSGTDFTLSINSVESEDIADYYCQQNNNWPTTFGAGTKLELKRT

SEQ ID NO: 27404 - protein, 449 aa, Artificial Sequence
  Synthetic peptide
  MISC_FEATURE (1)..(24): Optional residues
  MISC_FEATURE (148)..(162): Optional residues
MGSHHHHHHGSGSENLYFQGSGGSDLGKKLLEAARAGQDDEVRILMANGADVNAKDEYGLTPLYLATAHGHLEIVEVLLKNGADVNAVDAIGFTPLHLAAFIGHLEIAEVLLKHGADVNAQDKFGKTAFDISIGNGNEDLAEILQKLNSGSGSGKPGQASGSELARKLLEASTKLQRLNIRLAEALLEAIARLQELNLELVYLAVELTDPKRIRDEIKEVKDKSKEIIRRAEKEIDDAAKESEKILEEAREAISGSGSELAKLLLKAIAETQDLNLRAAKAFLEAAAKLQELNIRAVELLVKLTDPATIREALEHAKRRSKEIIDEAERAIRAAKRESERIIEEARRLIEKGSGSGSELARELLRAHAQLQRLNLELLRELLRALAQLQELNLDLLRLASELTDEIWIAQELRRIGDEFNAYYADAERLIREAAAASEKISREAERLIR

SEQ ID NO: 27405 - protein, 481 aa, Artificial Sequence
  Synthetic peptide
  MISC_FEATURE (1)..(24): Optional residues
  MISC_FEATURE (181)..(194): Optional residues
MGSHHHHHHGSGSENLYFQGSGGSDLGKKLLEAARAGQDDEVRILMANGADVNADDTWGWTPLHLAAYQGHLEIVEVLLKNGADVNAYDYIGWTPLHLAADGHLEIVEVLLKNGADVNASDYIGDTPLHLAAHNGHLEIVEVLLKHGADVNAQDKFGKTAFDISIDNGNEDLAEILQKLNSGSGSGKPGQASGSELARKLLEASTKLQRLNIRLAEALLEAIARLQELNLELVYLAVELTDPKRIRDEIKEVKDKSKEIIRRAEKEIDDAAKESEKILEEAREAISGSGSELAKLLLKAIAETQDLNLRAAKAFLEAAAKLQELNIRAVELLVKLTDPATIREALEHAKRRSKEIIDEAERAIRAAKRESERIIEEARRLIEKGSGSGSELARELLRAHAQLQRLNLELLRELLRALAQLQELNLDLLRLASELTDEIWIAQELRRIGDEFNAYYADAERLIREAAAASEKISREAERLIR

SEQ ID NO: 27406 - protein, 483 aa, Artificial Sequence
  Synthetic peptide
  MISC_FEATURE (1)..(24): Optional residues
  MISC_FEATURE (183)..(196): Optional residues
MGSHHHHHHGSGSENLYFQGSGGSDLGKKLLEAARAGQDDEVRILVANGADVNAYFGTTPLHLAAAHGRLEIVEVLLKNGADVNAQDVWGITPLHLAAYNGHLEIVEVLLKYGADVNAHDTRGWTPLHLAAINGHLEIVEVLLKNVADVNAQDRSGKTPFDLAIDNGNEDIAEVLQKAAKLNSGSGSGKPGQASGSELARKLLEASTKLQRLNIRLAEALLEAIARLQELNLELVYLAVELTDPKRIRDEIKEVKDKSKEIIRRAEKEIDDAAKESEKILEEAREAISGSGSELAKLLLKAIAETQDLNLRAAKAFLEAAAKLQELNIRAVELLVKLTDPATIREALEHAKRRSKEIIDEAERAIRAAKRESERIIEEARRLIEKGSGSGSELARELLRAHAQLQRLNLELLRELLRALAQLQELNLDLLRLASELTDEIWIAQELRRIGDEFNAYYADAERLIREAAAASEKISREAERLIR

SEQ ID NO: 27407 - protein, 449 aa, Artificial Sequence
  Synthetic peptide
  MISC_FEATURE (1)..(24): Optional residues
  MISC_FEATURE (149)..(162): Optional residues
MGSHHHHHHGSGSENLYFQGSGGSDLGKKLLEAARAGQDDEVRILMANGADVNAKDEYGLTPLYLATAHGHLEIVEVLLKNGADVNAVDAIGFTPLHLAAFIGHLEIAEVLLKHGADVNAQDKFGKTAFDISIGNGNEDLAEILQKLNSGSGSGKPGQASGSELARKLLEASTKLQRLNIRLAEALLEAIARLQELNLELVYLAVELTDPKRIRDEIKEVKDKSKEIIRRAEKEIDDAAKESEKILEEAREAISGSGSELAKLLLKAIAETQDLNLRAAKAFLEAAAKLQELNIRAVELLVKLTDPATIREALEHAKRRSKEIIDEAERAIRAAKRESERIIEEARRLIEKGSGSGSELARELLRAHAQLQRLNLELLRELLRALAQLQELNLDLLRLASELTDEIWIAQELRRIGDEFNAYYADAERLIREAAAASEKISREAERLAR

SEQ ID NO: 27408 - protein, 449 aa, Artificial Sequence
  Synthetic peptide
  MISC_FEATURE (1)..(24): Optional residues
  MISC_FEATURE (149)..(162): Optional residues
MGSHHHHHHGSGSENLYFQGSGGSDLGKKLLEAARAGQDDEVRILMANGADVNAKDEYGLTPLYLATAHGHLEIVEVLLKNGADVNAVDAIGFTPLHLAAFIGHLEIAEVLLKHGADVNAQDKFGKTAFDISIGNGNEDLAEILQKLNSGSGSGKPGQASGSELARKLLEASTKLQRLNIRLAEALLEAIARLQELNLELVYLAVELTDPKRIRDEIKEVKDKSKEIIRRAEKEIDDAAKESEKILEEAREAISGSGSELAKLLLKAIAETQDLNLRAAKAFLEAAAKLQELNIRAVELLVKLTDPATIREALEHAKRRSKEIIDEAERAIRAAKRESERIIEEARRLIEKGSGSGSELARELLRAHAQLQRLNLELLRELLRALAQLQELNLDLLRLASELTDEIWIAQELRRIGDEFNAYYADAERLIREAAAASEKISREAERLSR

SEQ ID NO: 27409 - protein, 449 aa, Artificial Sequence
  Synthetic peptide
  MISC_FEATURE (1)..(24): Optional residues
  MISC_FEATURE (149)..(162): Optional residues
MGSHHHHHHGSGSENLYFQGSGGSDLGKKLLEAARAGQDDEVRILMANGADVNAKDEYGLTPLYLATAHGHLEIVEVLLKNGADVNAVDAIGFTPLHLAAFIGHLEIAEVLLKHGADVNAQDKFGKTAFDISIGNGNEDLAEILQKLNSGSGSGKPGQASGSELARKLLEASTKLQRLNIRLAEALLEAIARLQELNLELVYLAVELTDPKRIRDEIKEVKDKSKEIIRRAEKEIDDAAKESEKILEEAREAISGSGSELAKLLLKAIAETQDLNLRAAKAFLEAAAKLQELNIRAVELLVKLTDPATIREALEHAKRRSKEIIDEAERAIRAAKRESERIIEEARRLIEKGSGSGSELARELLRAHAQLQRLNLELLRELLRALAQLQELNLDLLRLASELTDEIWIAQELRRIGDEFNAYYADAERLSREAAAASEKISREAERLIR

SEQ ID NO: 27410 - protein, 449 aa, Artificial Sequence
  Synthetic peptide
  MISC_FEATURE (1)..(24): Optional residues
  MISC_FEATURE (149)..(162): Optional residues
MGSHHHHHHGSGSENLYFQGSGGSDLGKKLLEAARAGQDDEVRILMANGADVNAKDEYGLTPLYLATAHGHLEIVEVLLKNGADVNAVDAIGFTPLHLAAFIGHLEIAEVLLKHGADVNAQDKFGKTAFDISIGNGNEDLAEILQKLNSGSGSGKPGQASGSELARKLLEASTKLQRLNIRLAEALLEAIARLQELNLELVYLAVELTDPKRIRDEIKEVKDKSKEIIRRAEKEIDDAAKESEKILEEAREAISGSGSELAKLLLKAIAETQDLNLRAAKAFLEAAAKLQELNIRAVELLVKLTDPATIREALEHAKRRSKEIIDEAERAIRAAKRESERIIEEARRLIEKGSGSGSELARELLRAHAQLQRLNLELLRELLRALAQLQELNLDLLRLASELTDEIWIAQELRRIGDEFNAYYADAERLSREAAAASEKISREAERLAR

SEQ ID NO: 27411 - protein, 449 aa, Artificial Sequence
  Synthetic peptide
  MISC_FEATURE (1)..(24): Optional residues
  MISC_FEATURE (149)..(162): Optional residues
MGSHHHHHHGSGSENLYFQGSGGSDLGKKLLEAARAGQDDEVRILMANGADVNAKDEYGLTPLYLATAHGHLEIVEVLLKNGADVNAVDAIGFTPLHLAAFIGHLEIAEVLLKHGADVNAQDKFGKTAFDISIGNGNEDLAEILQKLNSGSGSGKPGQASGSELARKLLEASTKLQRLNIRLAEALLEAIARLQELNLELVYLAVELTDPKRIRDEIKEVKDKSKEIIRRAEKEIDDAAKESEKILEEAREAISGSGSELAKLLLKAIAETQDLNLRAAKAFLEAAAKLQELNIRAVELLVKLTDPATIREALEHAKRRSKEIIDEAERAIRAAKRESERIIEEARRLIEKGSGSGSELARELLRAHAQLQRLNLELLRELLRALAQLQELNLDLLRLASELTDEIWIAQELRRIGDEFNAYYADAERLSREAAAASEKISREAERLSR

SEQ ID NO: 27412 - protein, 449 aa, Artificial Sequence
  Synthetic peptide
  MISC_FEATURE (1)..(24): Optional residues
  MISC_FEATURE (149)..(162): Optional residues
MGSHHHHHHGSGSENLYFQGSGGSDLGKKLLEAARAGQDDEVRILMANGADVNAKDEYGLTPLYLATAHGHLEIVEVLLKNGADVNAVDAIGFTPLHLAAFIGHLEIAEVLLKHGADVNAQDKFGKTAFDISIGNGNEDLAEILQKLNSGSGSGKPGQASGSELARKLLEASTKLQRLNIRLAEALLEAIARLQELNLELVYLAVELTDPKRIRDEIKEVKDKSKEIIRRAEKEIDDAAKESEKILEEAREAISGSGSELAKLLLKAIAETQDLNLRAAKAFLEAAAKLQELNIRAVELLVKLTDPATIREALEHAKRRSKEIIDEAERAIRAAKRESERIIEEARRLIEKGSGSGSELARELLRAHAQAQRLNLELLRELLRALAQLQELNLDLLRLASELTDEIWIAQELRRIGDEFNAYYADAERLIREAAAASEKISREAERLIR

SEQ ID NO: 27413 - protein, 586 aa, Artificial Sequence
  Synthetic peptide
  MISC_FEATURE (1)..(43): Optional residues
  MISC_FEATURE (285)..(299): Optional residues
METDTLLLWVLLLWVPGSTGDYKDEHHHHHHGGSENLYFQGSGDIQMTQSPSSLSASVGDRVTITCRASQDVNTAVAWYQQKPGKAPKLLIYSASFLYSGVPSRFSGSRSGTDFTLTISSLQPEDFATYYCQQHYTTPPTFGQGTKVEIKGSTSGSGKPGSGEGSGEVQLVESGGGLVQPGGSLRLSCAASGFNIKDTYIHWVRQAPGKGLEWVARIYPTNGYTRYADSVKGRFTISADTSKNTAYLQMNSLRAEDTAVYYCSRWGGDGFYAMDYWGQGTLVTVSSGSGSGKPGQASGSELARKLLEASTKLQRLNIRLAEALLEAIARLQELNLELVYLAVELTDPKRIRDEIKEVKDKSKEIIRRAEKEIDDAAKESEKILEEAREAISGSGSELAKLLLKAIAETQDLNLRAAKAFLEAAAKLQELNIRAVELLVKLTDPATIREALEHAKRRSKEIIDEAERAIRAAKRESERIIEEARRLIEKGSGSGSELARELLRAHAQLQRLNLELLRELLRALAQLQELNLDLLRLASELTDEIWIAQELRRIGDEFNAYYADAERLSREAAAASEKISREAERLIR

SEQ ID NO: 27414 - protein, 449 aa, Artificial Sequence
  Synthetic peptide
  MISC_FEATURE (1)..(24): Optional residues
  MISC_FEATURE (149)..(162): Optional residues
MGSHHHHHHGSGSENLYFQGSGGSDLGKKLLEAARAGQDDEVRILMANGADVNAKDEYGLTPLYLATAHGHLEIVEVLLKNGADVNAVDAIGFTPLHLAAFIGHLEIAEVLLKHGADVNAQDKFGKTAFDISIGNGNEDLAEILQKLNSGSGSGKPGQASGSELARKLLEASTKLQRLNIRLAEALLEAIARLQELNLELVYLAVELTDPKRIRDEIKEVKDKSKEIIRRAEKEIDDAAKESEKILEEAREAISGSGSELAKLLLKAIAETQDLNLRAAKAFLEAAAKLQELNIRAVELLVKLTDPATIREALEHAKRRSKEIIDEAERAIRAAKRESERIIEEARRLIEKGSGSGSELARELLRAHAQAQRLNLEALRELLRALAQLQELNLDLLRLASELTDEIWIAQELRRIGDEFNAYYADAERLIREAAAASEKISREAERLIR

SEQ ID NO: 27415 - protein, 481 aa, Artificial Sequence
  Synthetic peptide
  MISC_FEATURE (1)..(24): Optional residues
  MISC_FEATURE (181)..(194): Optional residues
MGSHHHHHHGSGSENLYFQGSGGSDLGKKLLEAARAGQDDEVRILMANGADVNADDTWGWTPLHLAAYQGHLEIVEVLLKNGADVNAYDYIGWTPLHLAADGHLEIVEVLLKNGADVNASDYIGDTPLHLAAHNGHLEIVEVLLKHGADVNAQDKFGKTAFDISIDNGNEDLAEILQKLNSGSGSGKPGQASGSELARKLLEASTKLQRLNIRLAEALLEAIARLQELNLELVYLAVELTDPKRIRDEIKEVKDKSKEIIRRAEKEIDDAAKESEKILEEAREAISGSGSELAKLLLKAIAETQDLNLRAAKAFLEAAAKLQELNIRAVELLVKLTDPATIREALEHAKRRSKEIIDEAERAIRAAKRESERIIEEARRLIEKGSGSGSELARELLRAHAQLQRLNLELLRELLRALAQLQELNLDLLRLASELTDEIWIAQELRRIGDEFNAYYADAERLSREAAAASEKISREAERLIR

SEQ ID NO: 27416 - protein, 481 aa, Artificial Sequence
  Synthetic peptide
  MISC_FEATURE (1)..(24): Optional residues
  MISC_FEATURE (181)..(194): Optional residues
MGSHHHHHHGSGSENLYFQGSGGSDLGKKLLEAARAGQDDEVRILMANGADVNADDTWGWTPLHLAAYQGHLEIVEVLLKNGADVNAYDYIGWTPLHLAADGHLEIVEVLLKNGADVNASDYIGDTPLHLAAHNGHLEIVEVLLKHGADVNAQDKFGKTAFDISIDNGNEDLAEILQKLNSGSGSGKPGQASGSELARKLLEASTKLQRLNIRLAEALLEAIARLQELNLELVYLAVELTDPKRIRDEIKEVKDKSKEIIRRAEKEIDDAAKESEKILEEAREAISGSGSELAKLLLKAIAETQDLNLRAAKAFLEAAAKLQELNIRAVELLVKLTDPATIREALEHAKRRSKEIIDEAERAIRAAKRESERIIEEARRLIEKGSGSGSELARELLRAHAQLQRLNLELLRELLRALAQLQELNLDLLRLASELTDEIWIAQELRRIGDEFNAYYADAERLIREAAAASEKISREAERLAR

SEQ ID NO: 27417 - protein, 481 aa, Artificial Sequence
  Synthetic peptide
  MISC_FEATURE (1)..(24): Optional residues
  MISC_FEATURE (181)..(194): Optional residues
MGSHHHHHHGSGSENLYFQGSGGSDLGKKLLEAARAGQDDEVRILMANGADVNADDTWGWTPLHLAAYQGHLEIVEVLLKNGADVNAYDYIGWTPLHLAADGHLEIVEVLLKNGADVNASDYIGDTPLHLAAHNGHLEIVEVLLKHGADVNAQDKFGKTAFDISIDNGNEDLAEILQKLNSGSGSGKPGQASGSELARKLLEASTKLQRLNIRLAEALLEAIARLQELNLELVYLAVELTDPKRIRDEIKEVKDKSKEIIRRAEKEIDDAAKESEKILEEAREAISGSGSELAKLLLKAIAETQDLNLRAAKAFLEAAAKLQELNIRAVELLVKLTDPATIREALEHAKRRSKEIIDEAERAIRAAKRESERIIEEARRLIEKGSGSGSELARELLRAHAQAQRLNLELLRELLRALAQLQELNLDLLRLASELTDEIWIAQELRRIGDEFNAYYADAERLIREAAAASEKISREAERLIR

SEQ ID NO: 27418 - protein, 535 aa, Artificial Sequence
  Synthetic peptide
  MISC_FEATURE (1)..(24): Optional residues
  MISC_FEATURE (183)..(248): Optional residues
MGSHHHHHHGSGSENLYFQGSGGSDLGKKLLEAARAGQDDEVRILVANGADVNAYFGTTPLHLAAAHGRLEIVEVLLKNGADVNAQDVWGITPLHLAAYNGHLEIVEVLLKYGADVNAHDTRGWTPLHLAAINGHLEIVEVLLKNVADVNAQDRSGKTPFDLAIDNGNEDIAEVLQKAAKLNSGSGSGSGSGSGSGSGSGSGSGSGSGSGSGSGSGSGSGSGSGSGSGSGSGSGSGSGSGKPGQASGSELARKLLEASTKLQRLNIRLAEALLEAIARLQELNLELVYLAVELTDPKRIRDEIKEVKDKSKEIIRRAEKEIDDAAKESEKILEEAREAISGSGSELAKLLLKAIAETQDLNLRAAKAFLEAAAKLQELNIRAVELLVKLTDPATIREALEHAKRRSKEIIDEAERAIRAAKRESERIIEEARRLIEKGSGSGSELARELLRAHAQLQRLNLELLRELLRALAQLQELNLDLLRLASELTDEIWIAQELRRIGDEFNAYYADAERLSREAAAASEKISREAERLIR

SEQ ID NO: 27419 - protein, 483 aa, Artificial Sequence
  Synthetic peptide
  MISC_FEATURE (1)..(24): Optional residues
  MISC_FEATURE (183)..(196): Optional residues
MGSHHHHHHGSGSENLYFQGSGGSDLGKKLLEAARAGQDDEVRILVANGADVNAYFGTTPLHLAAAHGRLEIVEVLLKNGADVNAQDVWGITPLHLAAYNGHLEIVEVLLKYGADVNAHDTRGWTPLHLAAINGHLEIVEVLLKNVADVNAQDRSGKTPFDLAIDNGNEDIAEVLQKAAKLNSGSGSGKPGQASGSELARKLLEASTKLQRLNIRLAEALLEAIARLQELNLELVYLAVELTDPKRIRDEIKEVKDKSKEIIRRAEKEIDDAAKESEKILEEAREAISGSGSELAKLLLKAIAETQDLNLRAAKAFLEAAAKLQELNIRAVELLVKLTDPATIREALEHAKRRSKEIIDEAERAIRAAKRESERIIEEARRLIEKGSGSGSELARELLRAHAQLQRLNLELLRELLRALAQLQELNLDLLRLASELTDEIWIAQELRRIGDEFNAYYADAERLSREAAAASEKISREAERLIR

SEQ ID NO: 27420 - protein, 483 aa, Artificial Sequence
  Synthetic peptide
  MISC_FEATURE (1)..(24): Optional residues
  MISC_FEATURE (183)..(196): Optional residues
MGSHHHHHHGSGSENLYFQGSGGSDLGKKLLEAARAGQDDEVRILVANGADVNAYFGTTPLHLAAAHGRLEIVEVLLKNGADVNAQDVWGITPLHLAAYNGHLEIVEVLLKYGADVNAHDTRGWTPLHLAAINGHLEIVEVLLKNVADVNAQDRSGKTPFDLAIDNGNEDIAEVLQKAAKLNSGSGSGKPGQASGSELARKLLEASTKLQRLNIRLAEALLEAIARLQELNLELVYLAVELTDPKRIRDEIKEVKDKSKEIIRRAEKEIDDAAKESEKILEEAREAISGSGSELAKLLLKAIAETQDLNLRAAKAFLEAAAKLQELNIRAVELLVKLTDPATIREALEHAKRRSKEIIDEAERAIRAAKRESERIIEEARRLIEKGSGSGSELARELLRAHAQLQRLNLELLRELLRALAQLQELNLDLLRLASELTDEIWIAQELRRIGDEFNAYYADAERLIREAAAASEKISREAERLAR

SEQ ID NO: 27421 - protein, 483 aa, Artificial Sequence
  Synthetic peptide
  MISC_FEATURE (1)..(24): Optional residues
  MISC_FEATURE (183)..(196): Optional residues
MGSHHHHHHGSGSENLYFQGSGGSDLGKKLLEAARAGQDDEVRILVANGADVNAYFGTTPLHLAAAHGRLEIVEVLLKNGADVNAQDVWGITPLHLAAYNGHLEIVEVLLKYGADVNAHDTRGWTPLHLAAINGHLEIVEVLLKNVADVNAQDRSGKTPFDLAIDNGNEDIAEVLQKAAKLNSGSGSGKPGQASGSELARKLLEASTKLQRLNIRLAEALLEAIARLQELNLELVYLAVELTDPKRIRDEIKEVKDKSKEIIRRAEKEIDDAAKESEKILEEAREAISGSGSELAKLLLKAIAETQDLNLRAAKAFLEAAAKLQELNIRAVELLVKLTDPATIREALEHAKRRSKEIIDEAERAIRAAKRESERIIEEARRLIEKGSGSGSELARELLRAHAQAQRLNLELLRELLRALAQLQELNLDLLRLASELTDEIWIAQELRRIGDEFNAYYADAERLIREAAAASEKISREAERLIR

SEQ ID NO: 27422 - protein, 477 aa, Artificial Sequence
  Synthetic peptide
  MISC_FEATURE (1)..(24): Optional residues
  MISC_FEATURE (181)..(194): Optional residues
MGSHHHHHHGSGSENLYFQGSGGSDLGKKLLEAARAGQDDEVRILMANGADVNADDTWGWTPLHLAAYQGHLEIVEVLLKNGADVNAYDYIGWTPLHLAADGHLEIVEVLLKNGADVNASDYIGDTPLHLAAHNGHLEIVEVLLKHGADVNAQDKFGKTAFDISIDNGNEDLAEILQKLNSGSGSGKPGQASGSELARKLLEASTKLQRLNIRLAEALLEAIARLQELNLELVYLAVELTDPKRIRDEIKEVKDKSKEIIRRAEKEIDDAAKESEKILEEAREAISGSGSELAKLLLKAIAETQDLNLRAAKAFLEAAAKLQELNIRAVELLVKLTDPATIREALEHAKRRSKEIIDEAERAIRAAKRESERIIEEARRLIEKGSGSGSELARELLRAHAQLQRLNLELLRELLRALAQLQELNLDLLRLASELRDHMVLHEYVNAAGITFNAYYADAERLIREAAAASEKISREAG

SEQ ID NO: 27423 - protein, 478 aa, Artificial Sequence
  Synthetic peptide
  MISC_FEATURE (1)..(24): Optional residues
  MISC_FEATURE (181)..(194): Optional residues
MGSHHHHHHGSGSENLYFQGSGGSDLGKKLLEAARAGQDDEVRILMANGADVNADDTWGWTPLHLAAYQGHLEIVEVLLKNGADVNAYDYIGWTPLHLAADGHLEIVEVLLKNGADVNASDYIGDTPLHLAAHNGHLEIVEVLLKHGADVNAQDKFGKTAFDISIDNGNEDLAEILQKLNSGSGSGKPGQASGSELARKLLEASTKLQRLNIRLAEALLEAIARLQELNLELVYLAVELTDPKRIRDEIKEVKDKSKEIIRRAEKEIDDAAKESEKILEEAREAISGSGSELAKLLLKAIAETQDLNLRAAKAFLEAAAKLQELNIRAVELLVKLTDPATIREALEHAKRRSKEIIDEAERAIRAAKRESERIIEEARRLIEKGSGSGSELARELLRAHAQLQRLNLELLRELLRALAQLQELNLDLLRLASELGRDHMVLHEYVNAAGITFNAYYADAERLIREAAAASEKISREAG

SEQ ID NO: 27424 - protein, 477 aa, Artificial Sequence
  Synthetic peptide
  MISC_FEATURE (1)..(24): Optional residues
  MISC_FEATURE (181)..(194): Optional residues
MGSHHHHHHGSGSENLYFQGSGGSDLGKKLLEAARAGQDDEVRILMANGADVNADDTWGWTPLHLAAYQGHLEIVEVLLKNGADVNAYDYIGWTPLHLAADGHLEIVEVLLKNGADVNASDYIGDTPLHLAAHNGHLEIVEVLLKHGADVNAQDKFGKTAFDISIDNGNEDLAEILQKLNSGSGSGKPGQASGSELARKLLEASTKLQRLNIRLAEALLEAIARLQELNLELVYLAVELTDPKRIRDEIKEVKDKSKEIIRRAEKEIDDAAKESEKILEEAREAISGSGSELAKLLLKAIAETQDLNLRAAKAFLEAAAKLQELNIRAVELLVKLTDPATIREALEHAKRRSKEIIDEAERAIRAAKRESERIIEEARRLIEKGSGSGSELARELLRAHAQLQRLNLELLRELLRALAQLQELNLDLLRLASELRDHMVLHEYVNAAGITFNAYYADAERLSREAAAASEKISREAG

SEQ ID NO: 27425 - protein, 478 aa, Artificial Sequence
  Synthetic peptide
  MISC_FEATURE (1)..(24): Optional residues
  MISC_FEATURE (181)..(194): Optional residues
MGSHHHHHHGSGSENLYFQGSGGSDLGKKLLEAARAGQDDEVRILMANGADVNADDTWGWTPLHLAAYQGHLEIVEVLLKNGADVNAYDYIGWTPLHLAADGHLEIVEVLLKNGADVNASDYIGDTPLHLAAHNGHLEIVEVLLKHGADVNAQDKFGKTAFDISIDNGNEDLAEILQKLNSGSGSGKPGQASGSELARKLLEASTKLQRLNIRLAEALLEAIARLQELNLELVYLAVELTDPKRIRDEIKEVKDKSKEIIRRAEKEIDDAAKESEKILEEAREAISGSGSELAKLLLKAIAETQDLNLRAAKAFLEAAAKLQELNIRAVELLVKLTDPATIREALEHAKRRSKEIIDEAERAIRAAKRESERIIEEARRLIEKGSGSGSELARELLRAHAQLQRLNLELLRELLRALAQLQELNLDLLRLASELRDHMVLHEYVNAAGITFNAYYADAERLIREAAAASEKISREAER

SEQ ID NO: 27426 - protein, 481 aa, Artificial Sequence
  Synthetic peptide
  MISC_FEATURE (1)..(24): Optional residues
  MISC_FEATURE (181)..(194): Optional residues
MGSHHHHHHGSGSENLYFQGSGGSDLGKKLLEAARAGQDDEVRILMANGADVNADDTWGWTPLHLAAYQGHLEIVEVLLKNGADVNAYDYIGWTPLHLAADGHLEIVEVLLKNGADVNASDYIGDTPLHLAAHNGHLEIVEVLLKHGADVNAQDKFGKTAFDISIDNGNEDLAEILQKLNSGSGSGKPGQASGSELARKLLEASTKLQRLNIRLAEALLEAIARLQELNLELVYLAVELTDPKRIRDEIKEVKDKSKEIIRRAEKEIDDAAKESEKILEEAREAISGSGSELAKLLLKAIAETQDLNLRAAKAFLEAAAKLQELNIRAVELLVKLTDPATIREALEHAKRRSKEIIDEAERAIRAAKRESERIIEEARRLIEKGSGSGSELARELLRAHAQLQRLNLELLRELLRALAQLQELNLDLLRLASELTDPDEARKAIARVKRESNAYYADAERLSREAAAASEKISREAERLIR

SEQ ID NO: 27427 - protein, 482 aa, Artificial Sequence
  Synthetic peptide
  MISC_FEATURE (1)..(24): Optional residues
  MISC_FEATURE (181)..(194): Optional residues
MGSHHHHHHGSGSENLYFQGSGGSDLGKKLLEAARAGQDDEVRILMANGADVNADDTWGWTPLHLAAYQGHLEIVEVLLKNGADVNAYDYIGWTPLHLAADGHLEIVEVLLKNGADVNASDYIGDTPLHLAAHNGHLEIVEVLLKHGADVNAQDKFGKTAFDISIDNGNEDLAEILQKLNSGSGSGKPGQASGSELARKLLEASTKLQRLNIRLAEALLEAIARLQELNLELVYLAVELTDPKRIRDEIKEVKDKSKEIIRRAEKEIDDAAKESEKILEEAREAISGSGSELAKLLLKAIAETQDLNLRAAKAFLEAAAKLQELNIRAVELLVKLTDPATIREALEHAKRRSKEIIDEAERAIRAAKRESERIIEEARRLIEKGSGSGSELARELLRAHAQAQRLNLELLRELLRALAQLQELNLDLLRLASELGTDPDEARKAIARVKRESNAYYADAERLSREAAAASEKISREAERLIR

SEQ ID NO: 27428 - protein, 478 aa, Artificial Sequence
  Synthetic peptide
  MISC_FEATURE (1)..(24): Optional residues
  MISC_FEATURE (181)..(194): Optional residues
MGSHHHHHHGSGSENLYFQGSGGSDLGKKLLEAARAGQDDEVRILMANGADVNADDTWGWTPLHLAAYQGHLEIVEVLLKNGADVNAYDYIGWTPLHLAADGHLEIVEVLLKNGADVNASDYIGDTPLHLAAHNGHLEIVEVLLKHGADVNAQDKFGKTAFDISIDNGNEDLAEILQKLNSGSGSGKPGQASGSELARKLLEASTKLQRLNIRLAEALLEAIARLQELNLELVYLAVELTDPKRIRDEIKEVKDKSKEIIRRAEKEIDDAAKESEKILEEAREAISGSGSELAKLLLKAIAETQDLNLRAAKAFLEAAAKLQELNIRAVELLVKLTDPATIREALEHAKRRSKEIIDEAERAIRAAKRESERIIEEARRLIEKGSGSGSELARELLRAHAQLQRLNLELLRELLRALAQLQELNLDLLRLASELGTDPDEARKAIARVKRESNAYYADAERLSREAAAASEKISREAG

SEQ ID NO: 27429 - protein, 479 aa, Artificial Sequence
  Synthetic peptide
  MISC_FEATURE (1)..(24): Optional residues
  MISC_FEATURE (181)..(194): Optional residues
MGSHHHHHHGSGSENLYFQGSGGSDLGKKLLEAARAGQDDEVRILMANGADVNADDTWGWTPLHLAAYQGHLEIVEVLLKNGADVNAYDYIGWTPLHLAADGHLEIVEVLLKNGADVNASDYIGDTPLHLAAHNGHLEIVEVLLKHGADVNAQDKFGKTAFDISIDNGNEDLAEILQKLNSGSGSGKPGQASGSELARKLLEASTKLQRLNIRLAEALLEAIARLQELNLELVYLAVELTDPKRIRDEIKEVKDKSKEIIRRAEKEIDDAAKESEKILEEAREAISGSGSELAKLLLKAIAETQDLNLRAAKAFLEAAAKLQELNIRAVELLVKLTDPATIREALEHAKRRSKEIIDEAERAIRAAKRESERIIEEARRLIEKGSGSGSELARELLRAHAQLQRLNLELLRELLRALAQLQELNLDLLRLASELGTDPDEARKAIARVKRESNAYYADAERLSREAAAASEKISREAER

SEQ ID NO: 27430 - protein, 481 aa, Artificial Sequence
  Synthetic peptide
  MISC_FEATURE (1)..(24): Optional residues
  MISC_FEATURE (181)..(194): Optional residues
MGSHHHHHHGSGSENLYFQGSGGSDLGKKLLEAARAGQDDEVRILMANGADVNADDTWGWTPLHLAAYQGHLEIVEVLLKNGADVNAYDYIGWTPLHLAADGHLEIVEVLLKNGADVNASDYIGDTPLHLAAHNGHLEIVEVLLKHGADVNAQDKFGKTAFDISIDNGNEDLAEILQKLNSGSGSGKPGQASGSELARKLLEASTKLQRLNIRLAEALLEAIARLQELNLELVYLAVELTDPKRIRDEIKEVKDKSKEIIRRAEKEIDDAAKESEKILEEAREAISGSGSELAKLLLKAIAETQDLNLRAAKAFLEAAAKLQELNIRAVELLVKLTDPATIREALEHAKRRSKEIIDEAERAIRAAKRESERIIEEARRLIEKGSGSGSELARELLRAHAQLQRLNLELLRELLRALAQLQELNLDLLRLASELGTDPDEARKAIARVKRESNAYYADAERLSREAAAASEKISREAERLI

SEQ ID NO: 27431 - protein, 482 aa, Artificial Sequence
  Synthetic peptide
  MISC_FEATURE (1)..(24): Optional residues
  MISC_FEATURE (181)..(194): Optional residues
MGSHHHHHHGSGSENLYFQGSGGSDLGKKLLEAARAGQDDEVRILMANGADVNADDTWGWTPLHLAAYQGHLEIVEVLLKNGADVNAYDYIGWTPLHLAADGHLEIVEVLLKNGADVNASDYIGDTPLHLAAHNGHLEIVEVLLKHGADVNAQDKFGKTAFDISIDNGNEDLAEILQKLNSGSGSGKPGQASGSELARKLLEASTKLQRLNIRLAEALLEAIARLQELNLELVYLAVELTDPKRIRDEIKEVKDKSKEIIRRAEKEIDDAAKESEKILEEAREAISGSGSELAKLLLKAIAETQDLNLRAAKAFLEAAAKLQELNIRAVELLVKLTDPATIREALEHAKRRSKEIIDEAERAIRAAKRESERIIEEARRLIEKGSGSGSELARELLRAHAQLQRLNLELLRELLRALAQLQELNLDLLRLASELGTDPDEARKAIARVKRESNAYYADAERLSREAAAASEKISREAERLIR

SEQ ID NO: 27432 - protein, 482 aa, Artificial Sequence
  Synthetic peptide
  MISC_FEATURE (1)..(24): Optional residues
  MISC_FEATURE (181)..(194): Optional residues
MGSHHHHHHGSGSENLYFQGSGGSDLGKKLLEAARAGQDDEVRILMANGADVNADDTWGWTPLHLAAYQGHLEIVEVLLKNGADVNAYDYIGWTPLHLAADGHLEIVEVLLKNGADVNASDYIGDTPLHLAAHNGHLEIVEVLLKHGADVNAQDKFGKTAFDISIDNGNEDLAEILQKLNSGSGSGKPGQASGSELARKLLEASTKLQRLNIRLAEALLEAIARLQELNLELVYLAVELTDPKRIRDEIKEVKDKSKEIIRRAEKEIDDAAKESEKILEEAREAISGSGSELAKLLLKAIAETQDLNLRAAKAFLEAAAKLQELNIRAVELLVKLTDPATIREALEHAKRRSKEIIDEAERAIRAAKRESERIIEEARRLIEKGSGSGSELARELLRAHAQLQRLNLELLRELLRALAQLQELNLDLLRLASELGTDPDEARKAIARVKRESNAYYADAERLIREAAAASEKISREAERLIR

SEQ ID NO: 27433 - protein, 482 aa, Artificial Sequence
  Synthetic peptide
  MISC_FEATURE (1)..(24): Optional residues
  MISC_FEATURE (181)..(194): Optional residues
MGSHHHHHHGSGSENLYFQGSGGSDLGKKLLEAARAGQDDEVRILMANGADVNADDTWGWTPLHLAAYQGHLEIVEVLLKNGADVNAYDYIGWTPLHLAADGHLEIVEVLLKNGADVNASDYIGDTPLHLAAHNGHLEIVEVLLKHGADVNAQDKFGKTAFDISIDNGNEDLAEILQKLNSGSGSGKPGQASGSELARKLLEASTKLQRLNIRLAEALLEAIARLQELNLELVYLAVELTDPKRIRDEIKEVKDKSKEIIRRAEKEIDDAAKESEKILEEAREAISGSGSELAKLLLKAIAETQDLNLRAAKAFLEAAAKLQELNIRAVELLVKLTDPATIREALEHAKRRSKEIIDEAERAIRAAKRESERIIEEARRLIEKGSGSGSELARELLRAHAQLQRLNLELLRELLRALAQLQELNLDLLRLASELGTDPDEARKAIARVKRESNAYYADAERLSREAAAASEKISREAERLAR

SEQ ID NO: 27434 - protein, 482 aa, Artificial Sequence
  Synthetic peptide
  MISC_FEATURE (1)..(24): Optional residues
  MISC_FEATURE (181)..(194): Optional residues
MGSHHHHHHGSGSENLYFQGSGGSDLGKKLLEAARAGQDDEVRILMANGADVNADDTWGWTPLHLAAYQGHLEIVEVLLKNGADVNAYDYIGWTPLHLAADGHLEIVEVLLKNGADVNASDYIGDTPLHLAAHNGHLEIVEVLLKHGADVNAQDKFGKTAFDISIDNGNEDLAEILQKLNSGSGSGKPGQASGSELARKLLEASTKLQRLNIRLAEALLEAIARLQELNLELVYLAVELTDPKRIRDEIKEVKDKSKEIIRRAEKEIDDAAKESEKILEEAREAISGSGSELAKLLLKAIAETQDLNLRAAKAFLEAAAKLQELNIRAVELLVKLTDPATIREALEHAKRRSKEIIDEAERAIRAAKRESERIIEEARRLIEKGSGSGSELARELLRAHAQLQRLNLELLRELLRALAQLQELNLDLLRLASELGTDPDEARKAIARVKRESNAYYADAERLIREAAAASEKISREAERLAR

SEQ ID NO: 27435 - protein, 481 aa, Artificial Sequence
  Synthetic peptide
  MISC_FEATURE (1)..(24): Optional residues
  MISC_FEATURE (181)..(194): Optional residues
MGSHHHHHHGSGSENLYFQGSGGSDLGKKLLEAARAGQDDEVRILMANGADVNADDTWGWTPLHLAAYQGHLEIVEVLLKNGADVNAYDYIGWTPLHLAADGHLEIVEVLLKNGADVNASDYIGDTPLHLAAHNGHLEIVEVLLKHGADVNAQDKFGKTAFDISIDNGNEDLAEILQKLNSGSGSGKPGQASGSELARKLLEASTKLQRLNIRLAEALLEAIARLQELNLELVYLAVELTDPKRIRDEIKEVKDKSKEIIRRAEKEIDDAAKESEKILEEAREAISGSGSELAKLLLKAIAETQDLNLRAAKAFLEAAAKLQELNIRAVELLVKLTDPATIREALEHAKRRSKEIIDEAERAIRAAKRESERIIEEARRLIEKGSGSGSELARELLRAHAQLQRLNLELLRELLRALAQLQELNLDLLRLASELTDPDEARKAIARVKRESNAYYADAERLSREAAAASEKISREAERLAR

SEQ ID NO: 27436 - protein, 481 aa, Artificial Sequence; identical to SEQ ID NO: 27426
  Synthetic peptide
  MISC_FEATURE (1)..(24): Optional residues
  MISC_FEATURE (181)..(194): Optional residues

SEQ ID NO: 27437 - protein, 481 aa, Artificial Sequence
  Synthetic peptide
  MISC_FEATURE (1)..(24): Optional residues
  MISC_FEATURE (181)..(194): Optional residues
MGSHHHHHHGSGSENLYFQGSGGSDLGKKLLEAARAGQDDEVRILMANGADVNADDTWGWTPLHLAAYQGHLEIVEVLLKNGADVNAYDYIGWTPLHLAADGHLEIVEVLLKNGADVNASDYIGDTPLHLAAHNGHLEIVEVLLKHGADVNAQDKFGKTAFDISIDNGNEDLAEILQKLNSGSGSGKPGQASGSELARKLLEASTKLQRLNIRLAEALLEAIARLQELNLELVYLAVELTDPKRIRDEIKEVKDKSKEIIRRAEKEIDDAAKESEKILEEAREAISGSGSELAKLLLKAIAETQDLNLRAAKAFLEAAAKLQELNIRAVELLVKLTDPATIREALEHAKRRSKEIIDEAERAIRAAKRESERIIEEARRLIEKGSGSGSELARELLRAHAQLQRLNLELLRELLRALAQLQELNLDLLRLASELTDPDEARKAIARVKRESNAYYADAERLIREAAAASEKISREAERLIR

SEQ ID NO: 27438 - protein, 491 aa, Artificial Sequence
  Synthetic peptide
  MISC_FEATURE (1)..(24): Optional residues
  MISC_FEATURE (181)..(194): Optional residues
MGSHHHHHHGSGSENLYFQGSGGSDLGKKLLEAARAGQDDEVRILMANGADVNADDTWGWTPLHLAAYQGHLEIVEVLLKNGADVNAYDYIGWTPLHLAADGHLEIVEVLLKNGADVNASDYIGDTPLHLAAHNGHLEIVEVLLKHGADVNAQDKFGKTAFDISIDNGNEDLAEILQKLNSGSGSGKPGQASGSELARKLLEASTKLQRLNIRLAEALLEAIARLQELNLELVYLAVELTDPKRIRDEIKEVKDKSKEIIRRAEKEIDDAAKESEKILEEAREAISGSGSELAKLLLKAIAETQDLNLRAAKAFLEAAAKLQELNIRAVELLVKLTDPATIREALEHAKRRSKEIIDEAERAIRAAKRESERIIEEARRLIEKGSGSGSELARELLRAHAQLQRLNLELLRELLRALAQLQELNLDLLRLASELGSEDLYFQGSTDPDEARKAIARVKRESNAYYADAERLSREAAAASEKISREAERLAR

SEQ ID NO: 27439 - protein, 491 aa, Artificial Sequence
  Synthetic peptide
  MISC_FEATURE (1)..(24): Optional residues
  MISC_FEATURE (181)..(194): Optional residues
MGSHHHHHHGSGSENLYFQGSGGSDLGKKLLEAARAGQDDEVRILMANGADVNADDTWGWTPLHLAAYQGHLEIVEVLLKNGADVNAYDYIGWTPLHLAADGHLEIVEVLLKNGADVNASDYIGDTPLHLAAHNGHLEIVEVLLKHGADVNAQDKFGKTAFDISIDNGNEDLAEILQKLNSGSGSGKPGQASGSELARKLLEASTKLQRLNIRLAEALLEAIARLQELNLELVYLAVELTDPKRIRDEIKEVKDKSKEIIRRAEKEIDDAAKESEKILEEAREAISGSGSELAKLLLKAIAETQDLNLRAAKAFLEAAAKLQELNIRAVELLVKLTDPATIREALEHAKRRSKEIIDEAERAIRAAKRESERIIEEARRLIEKGSGSGSELARELLRAHAQLQRLNLELLRELLRALAQLQELNLDLLRLASELGSEDLYFQGSTDPDEARKAIARVKRESNAYYADAERLSREAAAASEKISREAERLIR

SEQ ID NO: 27440 - protein, 491 aa, Artificial Sequence
  Synthetic peptide
  MISC_FEATURE (1)..(24): Optional residues
  MISC_FEATURE (181)..(194): Optional residues
MGSHHHHHHGSGSENLYFQGSGGSDLGKKLLEAARAGQDDEVRILMANGADVNADDTWGWTPLHLAAYQGHLEIVEVLLKNGADVNAYDYIGWTPLHLAADGHLEIVEVLLKNGADVNASDYIGDTPLHLAAHNGHLEIVEVLLKHGADVNAQDKFGKTAFDISIDNGNEDLAEILQKLNSGSGSGKPGQASGSELARKLLEASTKLQRLNIRLAEALLEAIARLQELNLELVYLAVELTDPKRIRDEIKEVKDKSKEIIRRAEKEIDDAAKESEKILEEAREAISGSGSELAKLLLKAIAETQDLNLRAAKAFLEAAAKLQELNIRAVELLVKLTDPATIREALEHAKRRSKEIIDEAERAIRAAKRESERIIEEARRLIEKGSGSGSELARELLRAHAQLQRLNLELLRELLRALAQLQELNLDLLRLASELGSEDLYFQGSTDPDEARKAIARVKRESNAYYADAERLIREAAAASEKISREAERLAR

SEQ ID NO: 27441 - protein, 491 aa, Artificial Sequence
  Synthetic peptide
  MISC_FEATURE (1)..(24): Optional residues
  MISC_FEATURE (181)..(194): Optional residues
MGSHHHHHHGSGSENLYFQGSGGSDLGKKLLEAARAGQDDEVRILMANGADVNADDTWGWTPLHLAAYQGHLEIVEVLLKNGADVNAYDYIGWTPLHLAADGHLEIVEVLLKNGADVNASDYIGDTPLHLAAHNGHLEIVEVLLKHGADVNAQDKFGKTAFDISIDNGNEDLAEILQKLNSGSGSGKPGQASGSELARKLLEASTKLQRLNIRLAEALLEAIARLQELNLELVYLAVELTDPKRIRDEIKEVKDKSKEIIRRAEKEIDDAAKESEKILEEAREAISGSGSELAKLLLKAIAETQDLNLRAAKAFLEAAAKLQELNIRAVELLVKLTDPATIREALEHAKRRSKEIIDEAERAIRAAKRESERIIEEARRLIEKGSGSGSELARELLRAHAQLQRLNLELLRELLRALAQLQELNLDLLRLASELGSEDLYFQGSTDPDEARKAIARVKRESNAYYADAERLIREAAAASEKISREAERLIR

SEQ ID NO: 27442 - protein, 481 aa, Artificial Sequence; identical to SEQ ID NO: 27437
  Synthetic peptide
  MISC_FEATURE (1)..(24): Optional residues
  MISC_FEATURE (181)..(194): Optional residues

SEQ ID NO: 27443 - protein, 480 aa, Artificial Sequence
  Synthetic peptide
  MISC_FEATURE (1)..(24): Optional residues
  MISC_FEATURE (181)..(194): Optional residues
MGSHHHHHHGSGSENLYFQGSGGSDLGKKLLEAARAGQDDEVRILMANGADVNADDTWGWTPLHLAAYQGHLEIVEVLLKNGADVNAYDYIGWTPLHLAADGHLEIVEVLLKNGADVNASDYIGDTPLHLAAHNGHLEIVEVLLKHGADVNAQDKFGKTAFDISIDNGNEDLAEILQKLNSGSGSGKPGQASGSELARKLLEASTKLQRLNIRLAEALLEAIARLQELNLELVYLAVELTDPKRIRDEIKEVKDKSKEIIRRAEKEIDDAAKESEKILEEAREAISGSGSELAKLLLKAIAETQDLNLRAAKAFLEAAAKLQELNIRAVELLVKLTDPATIREALEHAKRRSKEIIDEAERAIRAAKRESERIIEEARRLIEKGSGSGSELARELLRAHAQLQRLNLELLRELLRALAQLQELNLDLLRLASELRDHMVLHEYVNAAGITFNAYYADAERLIREAAAASEKISREAERLI

SEQ ID NO: 27444 - protein, 481 aa, Artificial Sequence
  Synthetic peptide
  MISC_FEATURE (1)..(24): Optional residues
  MISC_FEATURE (181)..(194): Optional residues
MGSHHHHHHGSGSENLYFQGSGGSDLGKKLLEAARAGQDDEVRILMANGADVNADDTWGWTPLHLAAYQGHLEIVEVLLKNGADVNAYDYIGWTPLHLAADGHLEIVEVLLKNGADVNASDYIGDTPLHLAAHNGHLEIVEVLLKHGADVNAQDKFGKTAFDISIDNGNEDLAEILQKLNSGSGSGKPGQASGSELARKLLEASTKLQRLNIRLAEALLEAIARLQELNLELVYLAVELTDPKRIRDEIKEVKDKSKEIIRRAEKEIDDAAKESEKILEEAREAISGSGSELAKLLLKAIAETQDLNLRAAKAFLEAAAKLQELNIRAVELLVKLTDPATIREALEHAKRRSKEIIDEAERAIRAAKRESERIIEEARRLIEKGSGSGSELARELLRAHAQLQRLNLELLRELLRALAQLQELNLDLLRLASELRDHMVLHEYVNAAGITFNAYYADAERLIREAAAASEKISREAERLIR

SEQ ID NO: 27445 - protein, 482 aa, Artificial Sequence
  Synthetic peptide
  MISC_FEATURE (1)..(24): Optional residues
  MISC_FEATURE (181)..(194): Optional residues
MGSHHHHHHGSGSENLYFQGSGGSDLGKKLLEAARAGQDDEVRILMANGADVNADDTWGWTPLHLAAYQGHLEIVEVLLKNGADVNAYDYIGWTPLHLAADGHLEIVEVLLKNGADVNASDYIGDTPLHLAAHNGHLEIVEVLLKHGADVNAQDKFGKTAFDISIDNGNEDLAEILQKLNSGSGSGKPGQASGSELARKLLEASTKLQRLNIRLAEALLEAIARLQELNLELVYLAVELTDPKRIRDEIKEVKDKSKEIIRRAEKEIDDAAKESEKILEEAREAISGSGSELAKLLLKAIAETQDLNLRAAKAFLEAAAKLQELNIRAVELLVKLTDPATIREALEHAKRRSKEIIDEAERAIRAAKRESERIIEEARRLIEKGSGSGSELARELLRAHAQLQRLNLELLRELLRALAQLQELNLDLLRLASELGTDPDEARKAIARVKRESNAYYADAERLSREAAAASEKISREAERLSR

SEQ ID NO: 27446 - protein, 482 aa, Artificial Sequence
  Synthetic peptide
  MISC_FEATURE (1)..(24): Optional residues
  MISC_FEATURE (181)..(194): Optional residues
MGSHHHHHHGSGSENLYFQGSGGSDLGKKLLEAARAGQDDEVRILMANGADVNADDTWGWTPLHLAAYQGHLEIVEVLLKNGADVNAYDYIGWTPLHLAADGHLEIVEVLLKNGADVNASDYIGDTPLHLAAHNGHLEIVEVLLKHGADVNAQDKFGKTAFDISIDNGNEDLAEILQKLNSGSGSGKPGQASGSELARKLLEASTKLQRLNIRLAEALLEAIARLQELNLELVYLAVELTDPKRIRDEIKEVKDKSKEIIRRAEKEIDDAAKESEKILEEAREAISGSGSELAKLLLKAIAETQDLNLRAAKAFLEAAAKLQELNIRAVELLVKLTDPATIREALEHAKRRSKEIIDEAERAIRAAKRESERIIEEARRLIEKGSGSGSELARELLRAHAQLQRLNLEALRELLRALAQLQELNLDLLRLASELGTDPDEARKAIARVKRESNAYYADAERLSREAAAASEKISREAERLIR

SEQ ID NO: 27447 - protein, 17 aa, Artificial Sequence
  Synthetic peptide
RDHMVLHEYVNAAGITF

SEQ ID NO: 27448 - protein, 220 aa, Artificial Sequence
  Synthetic peptide
  MISC_FEATURE (1)..(33): Optional residues
  MISC_FEATURE (78)..(96): Optional residues
MGSHHHHHHGSGSENLYFQGSYPYDVPDYAGGSDEARKAIARVKRESKRIVEDAERLIREAAAASEKISREAERLIRGGGSGSGSGSGKPGQASGSDLGKKLLEAARAGQDDEVRILMANGADVNAKDEYGLTPLYLATAHGHLEIVEVLLKNGADVNAVDAIGFTPLHLAAFIGHLEIAEVLLKHGADVNAQDKFGKTAFDISIGNGNEDLAEILQKLN

SEQ ID NO: 27449 - protein, 243 aa, Artificial Sequence
  Synthetic peptide
  MISC_FEATURE (1)..(24): Optional residues
  MISC_FEATURE (69)..(87): Optional residues
MGSHHHHHHGSGSENLYFQGSGGSDEARKAIARVKRESKRIVEDAERLIREAAAASEKISREAERLIRGGGSGSGSGSGKPGQASGSDLGKKLLEAARAGQDDEVRILMANGADVNADDTWGWTPLHLAAYQGHLEIVEVLLKNGADVNAYDYIGWTPLHLAADGHLEIVEVLLKNGADVNASDYIGDTPLHLAAHNGHLEIVEVLLKHGADVNAQDKFGKTAFDISIDNGNEDLAEILQKLN

SEQ ID NO: 27450 - protein, 245 aa, Artificial Sequence
  Synthetic peptide
  MISC_FEATURE (1)..(24): Optional residues
  MISC_FEATURE (69)..(87): Optional residues
MGSHHHHHHGSGSENLYFQGSGGSDEARKAIARVKRESKRIVEDAERLIREAAAASEKISREAERLIRGGGSGSGSGSGKPGQASGSDLGKKLLEAARAGQDDEVRILVANGADVNAYFGTTPLHLAAAHGRLEIVEVLLKNGADVNAQDVWGITPLHLAAYNGHLEIVEVLLKYGADVNAHDTRGWTPLHLAAINGHLEIVEVLLKNVADVNAQDRSGKTPFDLAIDNGNEDIAEVLQKAAKLN

SEQ ID NO: 27451 - protein, 242 aa, Artificial Sequence
  Synthetic peptide
  MISC_FEATURE (1)..(24): Optional residues
  MISC_FEATURE (66)..(84): Optional residues
MGSHHHHHHGSGSENLYFQGSGGSDEAIARVKRESKRIVEDAERLIREAAAASEKISREAERLIRGGGSGSGSGSGKPGQASGSDLGKKLLEAARAGQDDEVRILVANGADVNAYFGTTPLHLAAAHGRLEIVEVLLKNGADVNAQDVWGITPLHLAAYNGHLEIVEVLLKYGADVNAHDTRGWTPLHLAAINGHLEIVEVLLKNVADVNAQDRSGKTPFDLAIDNGNEDIAEVLQKAAKLN

SEQ ID NO: 27452 - protein, 238 aa, Artificial Sequence
  Synthetic peptide
  MISC_FEATURE (1)..(24): Optional residues
  MISC_FEATURE (62)..(80): Optional residues
MGSHHHHHHGSGSENLYFQGSGGSDEVKRESKRIVEDAERLIREAAAASEKISREAERLIRGGGSGSGSGSGKPGQASGSDLGKKLLEAARAGQDDEVRILVANGADVNAYFGTTPLHLAAAHGRLEIVEVLLKNGADVNAQDVWGITPLHLAAYNGHLEIVEVLLKYGADVNAHDTRGWTPLHLAAINGHLEIVEVLLKNVADVNAQDRSGKTPFDLAIDNGNEDIAEVLQKAAKLN

SEQ ID NO: 27453 - protein, 238 aa, Artificial Sequence
  Synthetic peptide
  MISC_FEATURE (1)..(24): Optional residues
  MISC_FEATURE (62)..(80): Optional residues
MGSHHHHHHGSGSENLYFQGSGGSDEARKAIARVKRESKRIVEDAERLIREAAAASEKISRGGGSGSGSGSGKPGQASGSDLGKKLLEAARAGQDDEVRILVANGADVNAYFGTTPLHLAAAHGRLEIVEVLLKNGADVNAQDVWGITPLHLAAYNGHLEIVEVLLKYGADVNAHDTRGWTPLHLAAINGHLEIVEVLLKNVADVNAQDRSGKTPFDLAIDNGNEDIAEVLQKAAKLN

SEQ ID NO: 27454 - protein, 208 aa, Artificial Sequence
  Synthetic peptide
  MISC_FEATURE (1)..(24): Optional residues
  MISC_FEATURE (66)..(84): Optional residues
MGSHHHHHHGSGSENLYFQGSGGSDEAIARVKRESKRIVEDAERLIREAAAASEKISREAERLIRGGGSGSGSGSGKPGQASGSDLGKKLLEAARAGQDDEVRILMANGADVNAKDEYGLTPLYLATAHGHLEIVEVLLKNGADVNAVDAIGFTPLHLAAFIGHLEIAEVLLKHGADVNAQDKFGKTAFDISIGNGNEDLAEILQKLN

SEQ ID NO: 27455 - protein, 240 aa, Artificial Sequence
  Synthetic peptide
  MISC_FEATURE (1)..(24): Optional residues
  MISC_FEATURE (66)..(84): Optional residues
MGSHHHHHHGSGSENLYFQGSGGSDEAIARVKRESKRIVEDAERLIREAAAASEKISREAERLIRGGGSGSGSGSGKPGQASGSDLGKKLLEAARAGQDDEVRILMANGADVNADDTWGWTPLHLAAYQGHLEIVEVLLKNGADVNAYDYIGWTPLHLAADGHLEIVEVLLKNGADVNASDYIGDTPLHLAAHNGHLEIVEVLLKHGADVNAQDKFGKTAFDISIDNGNEDLAEILQKLN

SEQ ID NO: 27456 - protein, 350 aa, Artificial Sequence
  Synthetic peptide
  MISC_FEATURE (1)..(44): Optional residues
  MISC_FEATURE (89)..(107): Optional residues
METDTLLLWVLLLWVPGSTGDYKDEHHHHHHGGSENLYFQGSGSDEARKAIARVKRESKRIVEDAERLIREAAAASEKISREAERLIRGGGSGSGSGSGKPGQASGSQVQLKQSGPGLVQPSQSLSITCTVSGFSLTNYGVHWVRQSPGKGLEWLGVIWSGGNTDYNTPFTSRLSINKDNSKSQVFFKMNSLQSNDTAIYYCARALTYYDYEFAYWGQGTLVTVSAGGGGSGGGGSGGGGSDILLTQSPVILSVSPGERVSFSCRASQSIGTNIHWYQQRTNGSPRLLIKYASESISGIPSRFSGSGSGTDFTLSINSVESEDIADYYCQQNNNWPTTFGAGTKLELKRT

SEQ ID NO: 27457 - protein, 242 aa, Artificial Sequence
  Synthetic peptide
  MISC_FEATURE (1)..(24): Optional residues
  MISC_FEATURE (66)..(84): Optional residues
MGSHHHHHHGSGSENLYFQGSGGSDEARKAIARVKRESKRIVEDAERLIREAAAASEKISREAERGGGSGSGSGSGKPGQASGSDLGKKLLEAARAGQDDEVRILVANGADVNAYFGTTPLHLAAAHGRLEIVEVLLKNGADVNAQDVWGITPLHLAAYNGHLEIVEVLLKYGADVNAHDTRGWTPLHLAAINGHLEIVEVLLKNVADVNAQDRSGKTPFDLAIDNGNEDIAEVLQKAAKLN

SEQ ID NO: 27458 - protein, 245 aa, Artificial Sequence
  Synthetic peptide
  MISC_FEATURE (1)..(24): Optional residues
  MISC_FEATURE (69)..(87): Optional residues
MGSHHHHHHGSGSENLYFQGSGGSDEARKAIARVKRESKRIVEDAERLIREAAAASEKSSREAERLARGGGSGSGSGSGKPGQASGSDLGKKLLEAARAGQDDEVRILVANGADVNAYFGTTPLHLAAAHGRLEIVEVLLKNGADVNAQDVWGITPLHLAAYNGHLEIVEVLLKYGADVNAHDTRGWTPLHLAAINGHLEIVEVLLKNVADVNAQDRSGKTPFDLAIDNGNEDIAEVLQKAAKLN

SEQ ID NO: 27459 - protein, 409 aa, Artificial Sequence
  Synthetic peptide
  MISC_FEATURE (1)..(24): Optional residues
  MISC_FEATURE (69)..(87): Optional residues
  MISC_FEATURE (244)..(251): Optional residues
MGSHHHHHHGSGSENLYFQGSGGSDEARKAIARVKRESKRIVEDAERLIREAAAASEKISREAERLIRGGGSGSGSGSGKPGQASGSDLGKKLLEAARAGQDDEVRILMANGADVNADDTWGWTPLHLAAYQGHLEIVEVLLKNGADVNAYDYIGWTPLHLAADGHLEIVEVLLKNGADVNASDYIGDTPLHLAAHNGHLEIVEVLLKHGADVNAQDKFGKTAFDISIDNGNEDLAEILQKLNGGGSGGGSDLGKKLLEAARAGQDDEVRILVANGADVNAYFGTTPLHLAAAHGRLEIVEVLLKNGADVNAQDVWGITPLHLAAYNGHLEIVEVLLKYGADVNAHDTRGWTPLHLAAINGHLEIVEVLLKNVADVNAQDRSGKTPFDLAIDNGNEDIAEVLQKAAKLN

SEQ ID NO: 27460 - protein, 232 aa, Artificial Sequence
  Synthetic peptide
  MISC_FEATURE (1)..(24): Optional residues
MGSHHHHHHGSGSENLYFQGSGGSAHAGRTGYDNREIVMKYIHYKLSQRGYEWDAGDVGAAPPGAAPAPGIFSSQPGHTPHPAASRDPVARTSPLQTPAAPGAAAGPALSPVPPVVHLTLRQAGDDFSRRYRRDFAEMSSQLHLTPFTARGRFATVVEELFRDGVNWGRIVAFFEFGGVMCVESVNREMSPLVDNIALWMTEYLNRHLHTWIQDNGGWDAFVELYGPSMRGC

SEQ ID NO: 27461 - protein, 214 aa, Artificial Sequence
  Synthetic peptide
  MISC_FEATURE (1)..(1): Optional residue
MSKGEELFTGVVPILVELDGDVNGHKFSVRGEGEGDATIGKLTLKFICTTGKLPVPWPTLVTTLTYGVQCFSRYPDHMKRHDFFKSAMPEGYVQERTISFKDDGKYKTRAVVKFEGDTLVNRIELKGTDFKEDGNILGHKLEYNFNSHNVYITADKQKNGIKANFTVRHNVEDGSVQLADHYQQNTPIGDGPVLLPDNHYLSTQTVLSKDPNEK

SEQ ID NO: 27462 - protein, 165 aa, Artificial Sequence
  Synthetic peptide
AHAGRTGYDNREIVMKYIHYKLSQRGYEWDAGDDAEEGRTEAPEGTESEVVHLTLRQAGDDFSRRYRRDFAEMSSQLHLTPFTARGRFATVVEELFRDGVNWGRIVAFFEFGGVMCVESVNREMSPLVDNIALWMTEYLNRHLHTWIQDNGGWDAFVELYGPSMR

SEQ ID NO: 27463 - protein, 164 aa, Artificial Sequence
  Synthetic peptide
AHAGRTGYDNREIVMKYIHYKLSQRGYEWDAGDDAEEGSGSGSGTESEVVHLTLRQAGDDFSRRYRRDFAEMSSQLHLTPFTARGRFATVVEELFRDGVNWGRIVAFFEFGGVMCVESVNREMSPLVDNIALWMTEYLNRHLHTWIQDNGGWDAFVELYGPSMR

SEQ ID NO: 27464 - protein, 165 aa, Artificial Sequence
  Synthetic peptide
AHAGRTGYDNREIVMKYIHYKLSQRGYEWDAGDDAEEGRTEAPEGTESEVVHQTLRQAGDDFERRYRRDFSDMSSQLHLTPDTARGRFATVVEELFRDGVNWGRIVAFFEFGGVMCVESVNREMSPLVDRIADWMTEYLNRHLHPWIQDNGGWDAFVELYGPSMR

SEQ ID NO: 27465 - protein, 164 aa, Artificial Sequence
  Synthetic peptide
AHAGRTGYDNREIVMKYIHYKLSQRGYEWDAGDDAEEGSGSGSGTESEVVHQTLRQAGDDFERRYRRDFSDMSSQLHLTPDTARQRFATVVEELFRDGVNWGRIVAFFEFGGVMCVESVNREMSPLVDRIADWMTEYLNRHLHPWIQDNGGWDAFVELYGPSMR

SEQ ID NO: 27466 - protein, 165 aa, Artificial Sequence
  Synthetic peptide
AHAGRTGYDNREIVMKYIHYKLSQRGYEWDAGDDAEEGRTEAPEGTESEVVHQTLRQAGDDFERRYRRDFSDMSSQLHLTPDTARQRFATVVEELFRDGVNWGRIVAFFEFGGVMAVEMVNRGGSPLVDRIADWMTEYLNRHLHPWIQDNGGWDAFVELYGPSMR

SEQ ID NO: 27467 - protein, 164 aa, Artificial Sequence
  Synthetic peptide
AHAGRTGYDNREIVMKYIHYKLSQRGYEWDAGDDAEEGSGSGSGTESEVVHQTLRQAGDDFERRYRRDFSDMSSQLHLTPDTARQRFATVVEELFRDGVNWGRIVAFFEFGGVMAVEMVNRGGSPLVDRIADWMTEYLNRHLHPWIQDNGGWDAFVELYGPSMR

SEQ ID NO: 27468 - protein, 165 aa, Artificial Sequence
  Synthetic peptide
AHAGRTGYDNREIVMKYIHYKLSQRGYEWDAGDDAEENRTEAPEGTESEVVHRALRDAGDDFERRYRRDFAEMSSQLHLTPDTARQRFETVVEELFRDGVNWGRIVAFFEFGGVMCVESVNREMSPLVDNIAEWMTEYLNRHLHTWIQDNGGWDAFVELYGPSMR

SEQ ID NO: 27469 - protein, 164 aa, Artificial Sequence
  Synthetic peptide
AHAGRTGYDNREIVRKYIHYKLSQRGYEWDAGDDAEEGSGSGSGTESEVVHRALRDAGDDFERRYRRDFAEMSSQLHLTPDTARQRFETVVEELFRDGVNWGRIVAFFEFGGVMCVECVNREMSPLVDNIAEWMTEYLNRHLHTWIQDNGGWDAFVELYGPSMR

SEQ ID NO: 27470 - protein, 923 aa, Artificial Sequence
  Synthetic peptide
MELAALCRWGLLLALLPPGAASTQVCTGTDMKLRLPASPETHLDMLRHLYQGCQVVQGNLELTYLPTNASLSFLQDIQEVQGYVLIAHNQVRQVPLQRLRIVRGTQLFEDNYALAVLDNGDPLNNTTPVTGASPGGLRELQLRSLTEILKGGVLIQRNPQLCYQDTILWKDIFHKNNQLALTLIDTNRSRACHPCSPMCKGSRCWGESSEDCQSLTRTVCAGGCARCKGPLPTDCCHEQCAAGCTGPKHSDCLACLHFNHSGICELHCPALVTYNTDTFESMPNPEGRYTFGASCVTACPYNYLSTDVGSCTLVCPLHNQEVTAEDGTQRCEKCSKPCARVCYGLGMEHLREVRAVTSANIQEFAGCKKIFGSLAFLPESFDGDPASNTAPLQPEQLQVFETLEEITGYLYISAWPDSLPDLSVFQNLQVIRGRILHNGAYSLTLQGLGISWLGLRSLRELGSGLALIHHNTHLCFVHTVPWDQLFRNPHQALLHTANRPEDECVGEGLACHQLCARGHCWGPGPTQCVNCSQFLRGQECVEECRVLQGLPREYVNARHCLPCHPECQPQNGSVTCFGPEADQCVACAHYKDPPFCVARCPSGVKPDLSYMPIWKFPDEEGACQPCPINCTHSCVDLDDKGCPAEQRASPLTSIISAVVGILLVVVLGVVFGILIKRRQQKGGTMVSKGEELFTGVVPILVELDGDVNGHKFSVSGEGEGDATYGKLTLKFICTTGKLPVPWPTLVTTLTYGVQCFSRYPDHMKQHDFFKSAMPEGYVQERTIFFKDDGNYKTRAEVKFEGDTLVNRIELKGIDFKEDGNILGHKLEYNYNSHNVYIMADKQKNGIKVNFKIRHNIEDGSVQLADHYQQNTPIGDGPVLLPDNHYLSTQSALSKDPNEKRDHMVLLEFVTAAGITLGMDELYK

SEQ ID NO: 27471 - protein, 996 aa, Artificial Sequence
  Synthetic peptide
MRPSGTAGAALLALLAALCPASRALEEKKVCQGTSNKLTQLGTFEDHFLSLQRMFNNCEVVLGNLEITYVQRNYDLSFLKTIQEVAGYVLIALNTVERIPLENLQIIRGNMYYENSYALAVLSNYDANKTGLKELPMRNLQEILHGAVRFSNNPALCNVESIQWRDIVSSDFLSNMSMDFQNHLGSCQKCDPSCPNGSCWGAGEENCQKLTKIICAQQCSGRCRGKSPSDCCHNQCAAGCTGPRESDCLVCRKFRDEATCKDTCPPLMLYNPTTYQMDVNPEGKYSFGATCVKKCPRNYVVTDHGSCVRACGADSYEMEEDGVRKCKKCEGPCRKVCNGIGIGEFKDSLSINATNIKHFKNCTSISGDLHILPVAFRGDSFTHTPPLDPQELDILKTVKEITGFLLIQAWPENRTDLHAFENLEIIRGRTKQHGQFSLAVVSLNITSLGLRSLKEISDGDVIISGNKNLCYANTINWKKLFGTSGQKTKIISNRGENSCKATGQVCHALCSPEGCWGPEPRDCVSCRNVSRGRECVDKCNLLEGEPREFVENSECIQCHPECLPQAMNITCTGRGPDNCIQCAHYIDGPHCVKTCPAGVMGENNTLVWKYADAGHVCHLCHPNCTYGCTGPGLEGCPTNGPKIPSIATGMVGALLLLLVVALGIGLFMRRRHIVRKRGGTMAEGSVARQPDLLTCDDEPIHIPGAIQPHGLLLALAADMTIVAGSDNLPELTGLAIGALIGRSAADVFDSETHNRLTIALAEPGAAVGAPITVGFTMRKDAGFIGSWHRHDQLIFLELEPPQRDVAEPQAFFRRTNSAIRRLQAAETLESACAAAAQEVRKITGFDRVMIYRFASDFSGEVIAEDRCAEVESKLGLHYPASTVPAQARRLYTINPVRIIPDINYRPVPVTPDLNPVTGRPIDLSFAILRSVSPVHLEFMRNIGMHGTMSISILRGERLWGLIVCHHRTPYYVDLDGRQACELVAQVLAWQIGVMEE

SEQ ID NO: 27472 - protein, 336 aa, Artificial Sequence
  Synthetic peptide
METDTLLLWVLLLWVPGSTGDGSEIWIAQELRRIGDEFNAYYASGSGMVSKGEELFTGVVPILVELDGDVNGHKFSVSGEGEGDATYGKLTLKFICTTGKLPVPWPTLVTTLTYGVQCFSRYPDHMKQHDFFKSAMPEGYVQERTIFFKDDGNYKTRAEVKFEGDTLVNRIELKGIDFKEDGNILGHKLEYNYNSHNVYIMADKQKNGIKVNFKIRHNIEDGSVQLADHYQQNTPIGDGPVLLPDNHYLSTQSALSKDPNEKRDHMVLLEFVTAAGITLGMDELYKNAVGQDTQEVIVVPHSLPFKVVVISAILALVVLTIISLIILIMLWQKKPR

SEQ ID NO: 27473 - protein, 1255 aa, Artificial Sequence [sequence omitted]

SEQ ID NO: 27474 - protein, 1210 aa, Artificial Sequence [sequence omitted]

SEQ ID NO: 27475 - protein, 314 aa, Artificial Sequence
  Synthetic peptide
MAPPQVLAFGLLLAAATATFAAAQEECVCENYKLAVNCFVNNNRQCQCTSVGAQNTVICSKLAAKCLVMKAEMNGSKLGRRAKPEGALQNNDGLYDPDCDESGLFKAKQCNGTSTCWCVNTAGVRRTDKDTEITCSERVRTYWIIIELKHKAREKPYDSKSLRTALQKEITTRYQLDPKFITSILYENNVITIDLVQNSSQKTQNDVDIADVAYYFEKDVKGESLFHSKKMDLTVNGEQLDLDPGQTLIYYVDEKAPEFSMQGLKAGVIAVIVVVVIAVVAGIVVLVISRKKRMAKYEKAEIKEMGEMHRELNA

SEQ ID NO: 27476 - protein, 171 aa, Artificial Sequence
  Synthetic peptide
  MISC_FEATURE (1)..(21): Optional residues
MGSHHHHHHGSGSENLYFQGSTDEIWIAQELRRIGDEFNAYYASGSGDLGKKLLEAARAGQDDEVRILMANGADVNAKDEYGLTPLYLATAHGHLEIVEVLLKNGADVNAVDAIGFTPLHLAAFIGHLEIAEVLLKHGADVNAQDKFGKTAFDISIGNGNEDLAEILQKLN

SEQ ID NO: 27477 - protein, 203 aa, Artificial Sequence
  Synthetic peptide
  MISC_FEATURE (1)..(21): Optional residues
MGSHHHHHHGSGSENLYFQGSTDEIWIAQELRRIGDEFNAYYASGSGDLGKKLLEAARAGQDDEVRILMANGADVNADDTWGWTPLHLAAYQGHLEIVEVLLKNGADVNAYDYIGWTPLHLAADGHLEIVEVLLKNGADVNASDYIGDTPLHLAAHNGHLEIVEVLLKHGADVNAQDKFGKTAFDISIDNGNEDLAEILQKLN

SEQ ID NO: 27478 - protein, 205 aa, Artificial Sequence
  Synthetic peptide
  MISC_FEATURE (1)..(21): Optional residues
MGSHHHHHHGSGSENLYFQGSTDEIWIAQELRRIGDEFNAYYASGSGDLGKKLLEAARAGQDDEVRILVANGADVNAYFGTTPLHLAAAHGRLEIVEVLLKNGADVNAQDVWGITPLHLAAYNGHLEIVEVLLKYGADVNAHDTRGWTPLHLAAINGHLEIVEVLLKNVADVNAQDRSGKTPFDLAIDNGNEDIAEVLQKAAKLN

SEQ ID NO: 27479 - protein, 22 aa, Artificial Sequence
  Synthetic peptide
YKDEHHHHHHGGSENLYFQGSG

SEQ ID NO: 27480 - protein, 19 aa, Artificial Sequence
  Synthetic peptide
GGGSGSGSGSGKPGQASGS

SEQ ID NO: 27481 - protein, 12 aa, Artificial Sequence
  Synthetic peptide
GSGSGKPGQASG

SEQ ID NO: 27482 - protein, 3 aa, Artificial Sequence
  Synthetic peptide
GGS

SEQ ID NO: 27483 - protein, 14 aa, Artificial Sequence
  Synthetic peptide
SGSGSGKPGQASGS

SEQ ID NO: 27484 - protein, 9 aa, Artificial Sequence
  Synthetic peptide
YPYDVPDYA

SEQ ID NO: 27485 - protein, 4 aa, Artificial Sequence
  Synthetic peptide
SGSG

SEQ ID NO: 27486 - protein, 9 aa, Artificial Sequence
  Synthetic peptide
NWSHPQFEK

SEQ ID NO: 27487 - protein, 66 aa, Artificial Sequence
  Synthetic peptide
SGSGSGSGSGSGSGSGSGSGSGSGSGSGSGSGSGSGSGSGSGSGSGSGSGSGSGSGSGKPGQASGS

SEQ ID NO: 27488 - protein, 5 aa, Artificial Sequence
  Synthetic peptide
GGGGS
